(19) United States
(12) Patent Application Publication
(10) Pub. No.: US 2006/0270621 A1
(43) Pub. Date: Nov. 30, 2006

(54) Inhibition of hair growth with RNAi targeting desmoglein 4 and nude mRNAs

(76) Inventor: Angela M. Christiano, Upper Saddle River, NJ (US)

Correspondence Address: BAKER & BOTTS, 30 ROCKEFELLER PLAZA, 44TH FLOOR, NEW YORK, NY, 10112, US

(21) Appl. No.: 11/252,110

(22) Filed: Oct. 17, 2005

Related U.S. Application Data
(63) Continuation-in-part of application No. PCT/US04/11697, filed on Apr. 15, 2004.
(60) Provisional application No. 60/464,013, filed on Apr. 17, 2003.
(60) Provisional application No. 60/620,272, filed on Oct. 18, 2004.

(51) Int. Cl. A61K 48/00

(52) U.S. Cl. 514/44; 424/73

(57) ABSTRACT

Methods for inhibition of desmoglein 4 and nude protein mRNA using RNA interference are described, in particular methods for inhibition or hair growth or hair removal. Also described are nucleic acid constructs for RNAi-mediated inhibition of desmoglein 4 and nude protein mRNA and compositions including such constructs.

### CROSS-REFERENCE TO RELATED PATENT APPLICATIONS

[0001] This application (i) is a continuation-in-part of International Patent Application No. PCT/US04/011697 filed Apr. 15, 2004 and published Nov. 4, 2004 in English as WO 2004/093788, which claims the benefit of U.S. Provisional Application No. 60/464,013, filed Apr. 17, 2003; and (ii) claims the benefit of priority of U.S. Patent Application No. 60/620,272 filed Oct. 18, 2004, the contents of each of the above-referenced patent application is hereby incorporated by reference in their entireties and to each of which priority is claimed.

[0002] The invention disclosed herein relates to work supported under grant number R01 44924 from the National Institutes of Health, U.S. Department of Health and Human Services.

### BACKGROUND OF THE INVENTION

[0003] The following is a discussion of some relevant art relating to hairless, desmoglein-4, and nude genes. This discussion is provided only to assist the understanding of the reader, and does not constitute an admission that any of the information provided or references cited constitutes prior art to the present invention. Each of the references cited is incorporated herein by reference in its entirety, including all tables and drawings.

[0004] As described in Christiano et al., WO 99/38965 (PCT/US99/02128), and in U.S. provisional application Ser. No. 60/565,127 filed Apr. 23, 2004, the human hair follicle is a dynamic structure which generates hair through a complex and highly regulated cycle of growth and remodeling. Hardy, 1992, Trends Genet. 8:159; Rosenquist and Martin, 1996, Dev. Dynamics 205:379. Hair growth is typically described as having three distinct phases. In the first phase, knows as anagen, the follicle is generated and new hair grows.

[0005] During the second phase, known as catagen, the follicle enters the stage where elongation ceases and the follicle regresses because the matrix cells stop proliferating. At this stage, the lower, transient half of the follicle is eliminated due to terminal differentiation and keratinization, and programmed cell death. Rosenquist and Martin, 1996, Dev. Dynamics 205:379. Also during catagen, although the dermal papilla remains intact, it undergoes several remodeling events, including degradation of the extracellular matrix that is deposited during anagen. At the close of catagen, the hair is only loosely anchored in a matrix of keratin, with the dermal papilla located just below. The catagen stage occurs at a genetically predetermined time, which is specific for each hair type in a species.

[0006] The third phase, known as telogen, is characterized by the follicle entering a quiescent phase, during which the hair is usually shed. When a new hair cycle is initiated, it is thought that a signal from the dermal papilla stimulates the stem cells, which are thought to reside in the permanent portion of the follicle, to undergo a phase of downward proliferation and genesis of a new bulbous base containing matrix cells which then surround the dermal papilla. As the new anagen state progresses, these hair matrix cells produce a new hair, and the the cycle begins again. Each follicle appears to be under completely asynchronous control, resulting in a continuum of follicles in anagen, catagen, and telogen phases, leading to a relatively homogeneous hair distribution. Hardy, 1992, Trends Genet. 8:159; Rosenquist and Martin, 1996, Dev. Dynamics 205:379.

[0007] The hair follicle develops as the result of a series of reciprocal epithelial-mesenchymal signals between the dermal papilla (DP) and the overlying epithelium during morphogenesis. It is the transmission of morphogenic signals via elaborate networks of cell contacts during development that transforms simple sheets of epithelial cells into complex three-dimensional structures, such as the hair follicle (Fuchs et al., 2001, Dev Cell 1: 13-25; Jamora and Fuchs, 2002, Nat Cell Biol 4:E101-108). The cellular rearrangements that occur with each adult mouse hair cycle are no less dynamic and well-orchestrated, given that the entire population of hair matrix keratinocytes is reduplicated in approximately 13 hours (Bullough and Laurence, 1958; Van Scott et al., 1963). Keratinocytes in the lowermost HF are multipotent and proliferate rapidly until they pass through a zone parallel to the widest part of the DP, known as the “critical region” or the line of Auber (Auber, 1952) above which mitosis ceases, differentiation begins, and the gradual elongation of cells takes place as they ascend and form the concentric layers of the HF.

[0008] Intercellular junctions are critical for orchestrating the molecular events during HF induction and cycling, which require synchronization of the transition from proliferation to differentiation (Jamora and Fuchs, 2002). Desmosomes are elaborate multiprotein complexes that link heterotypic cadherin partners to the intermediate filament (IF) network via plakin and armadillo family members (Fuchs et al., 2001; Green and Gaudry, 2000). In mouse and human, three desmoglein (DSG1,2,3) and three desmocollin (DSC1,2,3) genes have been described previously. DSG1, DSC1, DSG3 and DSC3 are predominantly expressed in stratifying squamous epithelia such as the epidermis, whereas DSG2 and DSC2 are present in simple epithelia and non-epithelial tissues as well. In the epidermis, DSG1 and DSC1 are expressed in the suprabasal layers of the epidermis, while DSG3 and DSC3 are present in the basal layer (Garrod et al., 2002; Green and Gaudry, 2000). DSG1 and DSG3 also serve as autoantigens in the acquired bullous dermatoses, pemphigus foliaceus and pemphigus vulgaris (PV), respectively, which are characterized by loss of cell-cell adhesion in the epidermis (Green and Gaudry, 2000; McMillan and Shimizu, 2001). Desmosomes impart structural integrity to tissues undergoing mechanical stress, and recent evidence suggests that they may also regulate the availability of signaling molecules and transduce signals that dictate the state of the cytoskeleton and activate downstream genetic programs (Fuchs et al., 2001; Green and Gaudry, 2000).

[0009] Another desmoglein gene was identified that was correlated with the lanceolate hair phenotype in rats and mice, and was further associated with human localized autosomal recessive hypotrichosis (LAH). That gene was designated desmoglein 4 (dsg4). The common phenotypic characteristics between lanceolate hair and LAH included sparse, fragile broken hair shafts which form a lance head at the tip. Jahoda et al., 2004, Genomics 83:747-756. It was determined that dsg4 is a key mediator of keratinocyte cell adhesion in the hair follicle, where it coordinates the transition from proliferation to differentiation. Dsg4 is expressed in the suprabasal epidermis and throughout the matrix, precortex, and IRS of the hair follicle, and is the principal desmosomal cadherin in the hair follicle. Dsg4 is expressed during the anagen phase of the hair cycle. Kljuic et al., 2003, Cell 113:249-260.

[0010] Christiano et al., PCT/US2004/011697 filed Apr. 15, 2004, describes inhibition of hair growth using inhibition of desmoglein 4 (dsg4) with catalytic oligonucleotides or oligonucleotides that hybridize with desmoglein 4 mRNA under high stringency, and mentions use of RNAi.

[0011] Another gene that has been related to hair growth is the nude gene, which is also referred to as “winged helix nude” (whn), and as “forkhead box N1” (foxN1). Mutations at the ‘nude’ locus of mice and rats disrupt normal hair growth and thymus development, causing nude mice and rats to be immune-deficient. It was shown that a gene designated whn, located in the region of mouse chromosome 11 known to contain the nude locus, encodes a new member of the winged-helix domain family of transcription factors. The predicted protein is 648 amino acids long. The whn gene was disrupted on the mouse and rat nude alleles. Mutant transcripts did not encode the characteristic DNA-binding domain, strongly suggesting that the whn gene is the nude gene. Mutations in winged-helix domain genes cause homeotic transformations in Drosophila and distort cell-fate decisions during vulval development in C. elegans. The whn gene was thus the first member of this class of genes to be implicated in a specific developmental defect in vertebrates. Nehls et al., New member of the winged-helix protein family disrupted in mouse and rat nude mutations. Nature 372: 103-107, 1994

[0012] It was further confirmed that mutations in whn produce the nude phenotype in mice. The sequence of the rat cDNA was determined, and it was shown that a mutation in whn produces both hairlessness and athymia. Segre et al., Positional cloning of the nude locus: genetic, physical, and transcription maps of the region and mutations in the mouse and rat. Genomics 28: 549-559, 1995. Using cross-hybridization, the human ortholog of the mouse whn gene was isolated. The predicted human protein also contains 648 amino acids, 85% of which are identical to the mouse protein. Schorpp et al., Characterization of mouse and human nude genes. Immunogenetics 46: 509-515, 1997. Both mouse and human WHN genes were characterized as including 8 coding exons and containing 2 alternative first exons. Using radiation hybrid analysis, the human WHN gene was assigned to 17q11-q12. Schorpp et al., Immunogenetics 46: 509-515, 1997.

[0013] Whn functions as a transcription factor, and, inter alia, regulates hair keratin gene expression, with the level of expression in the hair follicle depending on the stage of the hair cycle. Whn expression peaks in anagen (growth phase), but is absent in telogen (resting phase). Schlake et al., 2000, Forkhead/Winged-helix transcription factor whn regulates hair keratin gene expression: molecular analysis of the nude skin phenotype, Dev. Dynamics 217:368-376.

### SUMMARY OF THE INVENTION

[0014] The present invention concerns the use of RNA interference (RNAi) to inhibit mRNA's involved in hair growth, resulting in inhibition of hair growth. For many applications, short interfering RNA (siRNA) are used. Thus, inhibition of desmoglein 4 and/or nude protein mRNA can result in inhibition of hair growth, and thus provides a method for hair growth inhibition or hair removal. Consequently, inhibition of dsg4 and/or nude protein mRNA can be used for hair removal and/or hair growth inhibition in cosmetic, therapeutic, and industrial applications. Inhibition of dsg4 and/or nude protein mRNA can also be combined with inhibition of hairless protein mRNA and/or other hair growth inhibitors.

[0015] Thus, in a first aspect, the invention provides a method for hair growth inhibition or hair removal from a mammal, e.g., a human. The method involves applying to the mammal (e.g., a human) in an area comprising hair follicles a double stranded nucleic acid molecule that includes a sequence of at least a portion of dsg4 and/or nude protein mRNA (e.g., human dsg4 and/or nude mRNA) and a sequence complementary thereto wherein the double stranded molecule is RNAi inducing.

[0016] In particular embodiments, the inhibition of hair growth in the treated area is maintained for at least 1, 2, 4, 6, 8, 10, 12, or 24 months, or longer. Such maintenance can be accomplished by periodically applying the double stranded nucleic acid molecule(s), e.g., at 1 week, 2 week, 3 week, or 4 week intervals. Alternatively, the double stranded nucleic acid molecule(s) can be applied initially, and then repeated as needed to inhibit hair growth, e.g., repeating application when new hair growth becomes visible. Application can also be interrupted, with repeated application during a first interval, then no application during a second interval, and repeating as desired for a total interval.

[0017] In certain embodiments, the method also involves synchronizing hair growth cycles for hair follicles in the treated area, e.g., by extracting hairs such as by waxing. Such extraction causes follicles in anagen to transition into catagen thereby making those follicles susceptible to inhibition using this invention, and triggers new hair growth of follicles in telogen and thus makes those follicles suitable for transitioning into catagen. Thus, these methods synchronize hair follicles in the hair cycle. Such synchronization is particularly advantageous when inhibition of hairless protein mRNA is also used.

[0018] As used in connection with this invention, the term “hair removal” refers to physical removal and continuing inhibition of hair growth from one or more hair follicles. Typically the hair removal applies to a plurality of hair follicles in a skin area on a subject. For example, the area can be up to 2, 5, 10, 20, 50, 100, 200, 400, or more cm². For hair removal in an area, the hair removal may apply to all or a fraction of the hair follicles in the area, e.g., at least 10, 20, 30, 40, 50, 50, 70, 80, 90, 95%.

[0019] The phrase “inhibition of hair growth” refer to a non-natural reduction or stoppage of hair growth, e.g., caused at least in part by an agent not normally present in cells in a hair follicle. Thus, for example, inhibition of hair growth can be present as a reduction in the number of elongating hair shafts and/or reduction in elongation rate of at least some hair shafts in an area (e.g., at least 10, 20, 30, 40, 50, 50, 70, 80, 90, or 95%), and/or an increase in the percentage of hair shafts that break near the skin surface, as compared to a non-inhibited state.

[0020] The term “hair follicle” is used conventionally to refer to a biological hair producing structure.

[0021] As used in connection with the present methods, the term “applying” indicates that a substance is placed such that the substance is physically present on or in an area.

[0022] The term “nucleic acid molecule” refers to a polymer that includes a plurality of linked nucleotides or nucleotide analogs, and may include one or more modified internucleotidic linkages.

[0023] The terms “desmoglein 4 gene”, “dsg4 gene”, and similar terms refer to a mammalian gene that corresponds to reference human cDNA GenBank reference number NM_{—}177986, recognizing that polymorphisms and potentially sequencing errors may be present, or a species homolog of that sequence, e.g., mouse or rat homolog cDNA. Similarly the terms “desmoglein 4 protein mRNA” and “desmoglein 4 mRNA” refer to an mRNA encoding a desmoglein 4 gene protein, and “human desmoglein 4 mRNA” refers to a human homolog of such mRNA.

[0024] As used herein, the terms “nude gene”, “winged helix nude gene”, “winged helix transcription factor gene”, “whn gene”, “forkhead box N1 gene”, and “foxN1 gene” and similar terms refer to a mammalian gene that corresponds to reference human cDNA GenBank reference number NM_{—}003593, recognizing that polymorphisms and potentially sequencing errors may be present, or a species homolog of that sequence, e.g., mouse or rat homolog cDNA. Similarly the terms “nude protein mRNA” and “nude mRNA” refer to an mRNA encoding a nude gene protein, and “human nude mRNA” refers to a human homolog of such mRNA.

[0025] The term “hairless gene” refers to a mammalian gene that corresponds to reference human cDNA GenBank reference number NM_{—}005144, recognizing that polymorphisms and potentially sequencing errors may be present, or a species homolog of that sequence, e.g., mouse homolog cDNA sequence NM_{—}021877. Similarly the terms “hairless protein mRNA” and “hairless mRNA” refer to an mRNA encoding a hairless gene protein, and “human hairless mRNA” refers to a human homolog of such mRNA.

[0026] As used herein, the phrase “synchronizing hair growth cycles” means that at least 10% (or at least 20, 30, 40, 50, 60, 70, 80, 90, or 95%) of hair follicles in catagen or telogen phase in a particular area are caused to enter anagen phase essentially simultaneously (i.e., within 2 weeks). Such synchronizing can be accomplished, for example, with a physical action such as hair extraction or with one or more chemical or biomolecular agents.

[0027] As used in connection with oligonucleotide sequences, e.g., mRNA sequences such as dsg4 or nude, the term “at least an inhibitory portion” or “at least an RNAi inducing portion” indicates at least 14 contiguous linked nucleotides or more, e.g., 15, 16, 17, 18, 19, 20, 21, 22, 23, 24, 25, 26, 27, 28, 29, or more that inhibits expression of the encoded gene. Indication that the portion is RNAi inducing means that introduction of a double stranded portion induces the RNAi mechanism against the targeted mRNA in a competent cell.

[0028] As used herein, the term “hair extraction” refers to pulling of individual hair shafts out of their follicles.

[0029] A related aspect concerns a method for hair removal from an area of a mammal comprising hair follicles, where the method involves applying to the area a composition that includes at least one double stranded nucleic acid molecule able to inhibit dsg4 mRNA in vitro, and/or at least one double stranded nucleic acid molecule able to inhibit nude mRNA translation in vitro, which can also be combined with at least one double stranded nucleic acid molecule able to inhibit hairless mRNA translation in vitro.

[0030] In certain embodiments, the method also includes synchronizing hair growth cycles for hair follicles in the treated area, such as by hair extraction, e.g., using waxing; the mammal is a human; the mammal is a mouse; the mammal is a rat; the mammal is a bovine.

[0031] In another aspect, the invention provides a method of inhibiting expression of dsg4 and/or nude protein in a mammal. The method involves administering a double stranded nucleic acid molecule to the mammal, where the double stranded nucleic acid molecule includes a sequence selected from the group consisting of human dsg4 oligonucleotides 1-3561 (corresponding to SEQ ID NOs: 1-3561) and/or nude oligonucleotides 1-2679 (corresponding to SEQ ID NOs: 7123-9801) and their respective antisense sequences (SEQ ID NOs: 3562-7122 for dsg4 and SEQ ID NOs: 9802-12,480 for nude), or the species homology of such sequences, and a sequence complementary thereto.

[0032] As used in the context of this invention, the term “inhibiting expression” indicates that the level of mRNA and/or corresponding protein or rate of production of the corresponding protein in a cell that would otherwise produce the mRNA and/or protein is reduced as compared to a non-inhibited but otherwise equivalent cell. Reduction in the rate of production can be at various levels, including stopping such production.

[0033] The term “species homolog” refers to a form of a gene, or corresponding nucleic acid molecule, or polypeptide from a particular species that is sufficiently similar in sequence to the gene, corresponding nucleic acid, or polypeptide from a reference species that one skilled in the art recognizes a common evolutionary origin.

[0034] Thus, as used in connection with a molecule or composition, the phrases “able to inhibit dsg4 mRNA translation” and “able to inhibit nude mRNA translation” indicates that the molecule or composition has the property that when present in an effective amount in a cell that would translate dsg4 or nude mRNA to produce protein in the absence of an inhibitor, the molecule or composition reduces the rate of biosynthesis of dsg4 or nude protein respectively (or even eliminates such biosynthesis) without significantly reducing general cell processes. Highly preferably the reduction is specific to the indicated gene product. Such reduction can occur in various ways, for example, by reducing the amount of mRNA available for translation or by at least partially blocking translation of mRNA that is present.

[0035] Reference to Oligonucleotides by number utilizes the oligonucleotide numbering in Table 1 for dsg4 or Table 5 for nude, and therefore, specifies a nucleotide sequence of the corresponding SEQ ID NO.

[0036] In particular embodiments, the mammal is a human, a mouse, a rat, a bovine (such as a cow), an ovine (such as a sheep), a monkey, a porcine (such as domestic pig).

[0037] The term “bovine” is used conventionally to refer to cattle, oxen, and closely related ruminants.

[0038] Another aspect concerns a method for treating a human desirous of losing hair or inhibiting hair growth in a skin area. The method involves administering to the human a composition that includes at least one double stranded nucleic acid molecule that includes a sequence of at least an RNAi inducing portion of human dsg4 protein mRNA or at least an RNAi inducing portion of human nude protein mRNA, and a sequence complementary thereto. As indicated above, double stranded nucleic acid molecules corresponding to dsg4 and nude mRNA can be used in conjunction to inhibit both mRNAs, and can also be used in conjunction with inhibition of human hairless mRNA, e.g., by administration of double stranded nucleic acid molecule that includes a sequence of at least an RNAi inducing portion of human hairless protein mRNA.

[0039] As used herein, the phrase “desirous of losing hair” refers to an objective indication of consent or request for a process to remove hair from a body area in a manner reducing or eliminating future hair growth in that area for a period of time, e.g., at least 1 week, 2 weeks, 1 month, 2 months, or longer.

[0040] A further aspect concerns a method for marketing a composition for hair removal, which includes providing for sale to medical practitioners (e.g., doctors, nurse practitioners, doctor's assistants, and nurses) or to the public (e.g., spas and other body care businesses, and individuals) a packaged pharmaceutical composition that includes an RNAi inducing double stranded nucleic acid molecule containing a sequence of at least a portion of human dsg4 and/or nude protein mRNA and a sequence complementary thereto; and a package label or insert indicating that the pharmaceutical composition can be used for hair removal.

[0041] In particular embodiments, the pharmaceutical composition is approved by the U.S. Food and Drug Administration, and/or by an equivalent regulatory agency in Europe or Japan, for hair removal in humans; the pharmaceutical composition is packaged with a hair removal wax or other component adapted for hair removal.

[0042] The term “pharmaceutical composition” refers to a substance that contains at least one biologically active component. The composition typically also contains at least one pharmaceutically acceptable carrier or excipient.

[0043] As used herein, the term “packaged” means that the referenced material or composition is enclosed in a container or containers in a manner suitable for storage or transportation. For example, a pharmaceutical composition may be sealed in a vial, bottle, tube, or the like, which may itself be inside a box. Typically, a label on the container identifies the contents and may also provide instructions for use and/or cautions to prevent misuse.

[0044] The term “hair removal wax” refers to refer to a substance that is adapted for removal of hair by embedding hair in the substance and then pulling the material away, thereby pulling embedded hairs out of the hair follicles. The substance may be used with a backing material such as paper or cloth. Both hot and cold waxes are commonly available. Unless clearly indicated, the term is not limited to substances that are chemically waxes; for example, the term will generally include substances such as caramel-based substances that are used for “sugaring”.

[0045] The term “other component adapted for hair removal” refers to a material or device that can be used for physically removing hairs and is either generally recognized as suitable for such use, of instructions are provided indicating that the component can be used for physical hair removal or providing instructions on performing such removal.

[0046] Another aspect concerns an isolated double stranded nucleic acid molecule that includes a nucleotide sequence having the sequence of a portion at least 14 contiguous nucleotides in length from human dsg4 mRNA or from human nude mRNA, and a nucleotide sequence complementary thereto, where the double stranded nucleic acid molecule induces RNA interference in a human cell in vitro.

[0047] In particular embodiments the nucleotide sequence of the molecule contains a nucleotide sequence selected from the group consisting of dsg4 oligonucleotides 1-3561 (i.e., SEQ ID NOs: 1-3561) or nude oligonucleotides 1-2679 (i.e., SEQ ID NOs: 7123-9801). In particular embodiments, the nucleotide is 14-50, 17-40, 17-30, 17-25, 19-30, 19-29, 19-28, 19-26, 19-25, 19-24, 19-23, 20-23, 20-22, or 21-22 nucleotides in length.

[0048] Indication that a molecule or material of interest “induces RNA interference in a human cell in vitro” means that when present in cultured cells that are capable of RNA interference and under conditions such that a molecule or molecules that will normally induce RNA interference do induce RNAi in the cell, the molecule or material of interest will induce such RNA interference.

[0049] Likewise, in another aspect the invention provides a pharmaceutical composition that includes at least one double stranded nucleic acid molecule as described above or otherwise described herein that induces inhibition of dsg4 or nude protein expression, e.g., that contains a nucleotide sequence corresponding to 14-50, 17-40, 17-30, 17-25, 19-30, 19-29, 19-28, 19-26, 19-25, 19-24, 19-23, 20-23, 20-22, or 21-22 contiguous nucleotides from human dsg4 or nude mRNA, or including a nucleotide sequence selected from the group consisting of dsg4 oligonucleotides 1-3561 (corresponding to SEQ ID NOs: 1-3561) or nude oligonucleotides 1-2679 (corresponding to SEQ ID NOs: 7123-9801), and a sequence complementary thereto, wherein the double stranded nucleic acid molecule induces RNA interference in a human cell in vitro. The composition can include oligonucleotides that inhibit both dsg4 and nude protein expression, and can also be combined with an agent that inhibits hairless protein expression, such as a double stranded nucleic acid molecule that induces inhibition of hairless protein expression.

[0050] In yet another aspect, the invention provides a kit that includes a pharmaceutical composition as described herein (e.g., that contains a RNAi inducing double stranded nucleic acid molecule that includes a sequence of at least a portion of human dsg4 or nude protein mRNA and a sequence complementary thereto); and a package label or insert indicating that said pharmaceutical composition can be used for hair removal or hair growth inhibition.

[0051] In certain embodiments, the kit is approved by the U.S. Food and Drug Administration or equivalent regulatory agency in Europe or Japan, for human hair removal.

[0052] In certain embodiments of the above aspects or other aspects described herein, the double stranded nucleic acid includes at least one (i.e., one or two) 3′-overhang, e.g., a 1, 2, or 3 nucleotide overhang. In certain embodiments, such overhang includes one or more non-ribonucleotides; includes 1, 2, or 3 deoxynucleotides; includes a modified linkage; each strand has a 1, 2, or 3 nucleotide overhang.

[0053] In certain embodiments of the above aspects, at least one strand of the double stranded nucleic acid includes at least one nucleotide analog or internucleotidic linkage different from unmodified RNA; each strand includes at least one nucleotide analog or internucleotidic linkage different from unmodified RNA; at least one strand includes at least one modified nucleotide; each strand includes at least one modified nucleotide.

[0054] In certain embodiments of the above aspects, the double stranded nucleic acid molecule induces RNA interference in a cell in vitro and includes at least 10 nucleotides corresponding to a loop sequence in dsg4 or nude mRNA identified herein, and a sequence complementary thereto; is targeted to a site in the coding sequence (CDS) of dsg4 or nude; includes a nucleotide having the sequence of a nucleotide listed in a table herein.

[0055] In certain embodiments of the above aspects, in the double stranded nucleic acid molecule, the sense sequence and the antisense sequence each include 19, 20, 21, 22, 23, 24, 25, 26, 27, 28, or 29 complementary nucleotides and 1 to 3 non-complementary 3′-nucleotides. In certain embodiments, the sense strand is 19, 20, 21, 22, 23, 24, 25, 26, 27, 28, 29, 30, 31, 32, 33, 34, or 35 nucleotides in length.

[0056] In certain embodiments of the above aspects, chemically modified nucleic acids are used, e.g., chemically modified siRNAs (also referred to as siNAs) as described in McSwiggen et al., PCT/US03/05346, WO 03/070918, which is incorporated herein by reference in its entirety.

[0057] As used herein, the terms “siRNA” and “siNA” both refer to double stranded nucleic acid that induces RNAi, and includes unmodified RNA oligonucleotides and chemically modified oligonucleotides. When unmodified RNA is intended, the term “unmodified RNA” is expressly used.

[0058] The term “RNAi inducing oligonucleotide” or “RNA interference inducing oligonucleotide” refers to an oligonucleotide, generally a double stranded molecule (usually an siRNA molecule), that is able to induce RNA interference in a suitable cell.

[0059] In certain embodiments of the above aspects involving application of the present oligonucleotides to a mammal, the oligonucleotides are applied at 0.01 to 0.1 microgram/cm², 0.1 to 0.2 microgram/cm², 0.2 to 0.5 microgram/cm², 0.5 to 1.0 microgram/cm², 1.0 to 2.0 microgram/cm², 2.0 to 5.0 microgram/cm², or 5.0 to 10.0 microgram/cm²; a combination of different RNAi inducing oligonucleotides is applied, which application can be as a mixture or mixtures or separately, e.g., 2, 3, 4, 5, 6, 7, 8, 9, 10, or more different oligonucleotides; one or more different RNAi inducing oligonucleotides is applied in combination (as a mixture or separately) with one or more different agents that inhibit dsg4 and/or nude translation or activity (and can also include an an agent or agents that inhibit hairless translation or hairless activity); one or more different RNAi inducing oligonucleotides is applied in combination with one or more other hair removal agents, such as chemical depilatories and/or enzymatic hair removal agents. In accordance with the preceding description of embodiments, certain of the present pharmaceutical compositions also include at least one dsg4, nude, or hairless inhibiting agent different from an RNAi inducing agent; at least one chemical depilatory; at least one enzymatic hair removal agent.

[0060] In certain embodiments, the present RNAi inducing oligonucleotides are applied once; applied daily for at least 7 days; applied daily for at least 14 days; applied on at least 4 days within a one month period; applied on at least 7 days within a one month period; applied at least 4 days per week for at least a four week period.

[0061] In particular embodiments, the method of use includes synchronizing hair cycles, e.g., as described herein.

[0062] In particular embodiments involving mammalian mRNAs, the RNAi inducing oligonucleotide (e.g., siRNA) includes a sequence 17, 18, 19, 20, 21, 22, 23, 24, or 25 nucleotides in length (or at least one of those lengths) of one of the sequences shown in Table 1 or Table 5, or a sequence complementary thereto; the RNAi inducing oligonucleotide targets a mammalian dsg4 or nude mRNA sequence corresponding to a sequence shown in Table 1 or Table 5.

[0063] Additional embodiments will be apparent from the Detailed Description and from the claims.

### DETAILED DESCRIPTION OF THE PREFERRED EMBODIMENTS

[0064] The present invention concerns methods for inhibiting hair growth or removing hair, by inhibiting particular mRNAs using RNAi, e.g., using siRNA.

A. RNAi and siRNA

[0065] RNA interference (RNAi) refers to the process of sequence-specific post-transcriptional gene silencing in animals mediated by short interfering RNAs (siRNAs) (Fire et al., 1998, Nature, 391, 806). The corresponding process in plants is commonly referred to as post-transcriptional gene silencing or RNA silencing and is also referred to as quelling in fungi. The process of post-transcriptional gene silencing is thought to be an evolutionarily-conserved cellular defense mechanism used to prevent the expression of foreign genes and is commonly shared by diverse flora and phyla (Fire et al., 1999, Trends Genet., 15, 358). The presence of dsRNA in cells triggers the RNAi response though a mechanism that appears to be different from the interferon response that results from dsRNA-mediated activation of protein kinase PKR and 2′,5′-oligoadenylate synthetase resulting in non-specific cleavage of mRNA by ribonuclease L.

[0066] The presence of long dsRNAs in cells stimulates the activity of the enzyme, dicer, a ribonuclease III. Dicer is involved in the processing of the dsRNA into short pieces of dsRNA known as short interfering RNAs (siRNAs) (Berstein et al., 2001, Nature, 409, 363). The resulting RNAs are typically about 21 to about 23 nucleotides in length, with complementary sequences of about 19 base pairs. Dicer has also been implicated in the excision of 21- and 22-nucleotide small temporal RNAs (stRNAs) from precursor RNA of conserved structure that are implicated in translational control (Hutvagner et al., 2001, Science, 293, 834). The RNAi response also involves an endonuclease complex, commonly referred to as an RNA-induced silencing complex (RISC), which mediates cleavage of single-stranded RNA having sequence complementary to the antisense strand of the siRNA duplex. Cleavage of the target RNA takes place in the middle of the region complementary to the antisense strand of the siRNA duplex (Elbashir et al., 2001, Genes Dev., 15, 188).

[0067] RNAi has been studied in a variety of systems. Fire et al., 1998, Nature, 391, 806, described RNAi in C. elegans. Wianny and Goetz, 1999, Nature Cell Biol., 2, 70, describe RNAi mediated by dsRNA in mouse embryos. Hammond et al., 2000, Nature, 404, 293, describe RNAi in Drosophila cells transfected with dsRNA. Elbashir et al., 2001, Nature, 411, 494, describe RNAi induced by introduction of duplexes of synthetic 21-nucleotide RNAs in cultured mammalian cells including human embryonic kidney and HeLa cells.

[0068] Work in Drosophila embryonic lysates (Elbashir et al., 2001, EMBO J, 20, 6877) has revealed certain factors of siRNA length, structure, chemical composition, and sequence that are significantly affect efficient RNAi activity. These studies have shown that 21-nucleotide siRNA duplexes are most active when containing 3′-terminal nucleotide overhangs. Furthermore, complete substitution of one or both siRNA strands with 2′-deoxy (2′-H) or 2′-O-methyl nucleotides abolishes RNAi activity, whereas substitution of the 3′-terminal siRNA overhang nucleotides with 2′-deoxy nucleotides (2′-H) was shown to be tolerated. Single mismatch sequences in the center of the siRNA duplex were also shown to abolish RNAi activity. In addition, these studies also indicate that the position of the cleavage site in the target RNA is defined by the 5′-end of the siRNA guide sequence rather than the 3′-end of the guide sequence (Elbashir et al., 2001, EMBO J., 20, 6877). Other studies have suggested that a 5′-phosphate on the target-complementary strand of a siRNA duplex is important for siRNA activity and that ATP is utilized to maintain the 5′-phosphate moiety on the siRNA (Nykanen et al., 2001, Cell, 107, 309).

[0069] Studies have shown that replacing the 3′-terminal nucleotide overhanging segments of a 21-mer siRNA duplex having two 2-nucleotide 3′-overhangs with deoxyribonucleotides does not have an adverse effect on RNAi activity. Replacing up to 4 nucleotides on each end of the siRNA with deoxyribonucleotides has been reported to be well-tolerated whereas complete substitution with deoxyribonucleotides results in no RNAi activity, but that substitution of siRNA with 2′-O-methyl nucleotides completely abolishes RNAi activity. (Elbashir et al., 2001, EMBO J, 20, 6877.)

[0070] Li et al., International PCT Publication No. WO 00/44914, and Beach et al., International PCT Publication No. WO 01/68836 both suggest that siRNA “may include modifications to either the phosphate-sugar backbone or the nucleoside . . . to include at least one of a nitrogen or sulfur heteroatom.”

[0071] Kreutzer and Limmer, Canadian Patent Application No. 2,359,180, also describe certain chemical modifications for use in dsRNA constructs in order to counteract activation of double-stranded RNA-dependent protein kinase PKR, specifically 2′-amino or 2′-O-methyl nucleotides, and nucleotides containing a 2′-O or 4′-C methylene bridge

[0072] Parrish et al., 2000, Molecular Cell, 6, 1977-1087, tested certain chemical modifications targeting the unc-22 gene in C. elegans using long (>25 nt) siRNA transcripts. The authors describe the introduction of thiophosphate residues into these siRNA transcripts by incorporating thiophosphate nucleotide analogs with T7 and T3 RNA polymerase and observed that “RNAs with two [phosphorothioate] modified bases also had substantial decreases in effectiveness as RNAi triggers (data not shown); [phosphorothioate] modification of more than two residues greatly destabilized the RNAs in vitro and we were not able to assay interference activities.” Id. at 1081. The authors also tested certain modifications at the 2′-position of the nucleotide sugar in the long siRNA transcripts and observed that substituting deoxynucleotides for ribonucleotides “produced a substantial decrease in interference activity,” especially in the case of Uridine to Thymidine and/or Cytidine to deoxy-Cytidine substitutions. Id. In addition, the authors tested certain base modifications, including substituting, in sense and antisense strands of the siRNA, 4-thiouracil, 5-bromouracil, 5-iodouracil, and 3-(aminoallyl)uracil for uracil, and inosine for guanosine. They found that whereas 4-thiouracil and 5-bromouracil were all well-tolerated, inosine “produced a substantial decrease in interference activity” when incorporated in either strand. Incorporation of 5-iodouracil and 3-(aminoallyl)uracil in the antisense strand resulted in substantial decrease in RNAi activity as well.

[0073] Beach et al., International PCT Publication No. WO 01/68836, describes specific methods for attenuating gene expression using endogenously-derived dsRNA.

[0074] Tuschl et al., International PCT Publication No. WO 01/75164, describe a Drosophila in vitro RNAi system and the use of specific siRNA molecules for certain functional genomic and certain therapeutic applications; although Tuschl, 2001, Chem., Biochem., 2, 239-245, doubts that RNAi can be used to cure genetic diseases or viral infection due “to the danger of activating interferon response.”

[0075] Li et al., International PCT Publication No. WO 00/44914, describe the use of specific dsRNAs for use in attenuating the expression of certain target genes.

[0076] Zernicka-Goetz et al., International PCT Publication No. WO 01/36646, describe certain methods for inhibiting the expression of particular genes in mammalian cells using certain dsRNA molecules.

[0077] Fire et al., International PCT Publication No. WO 99/32619, describe particular methods for introducing certain dsRNA molecules into cells for use in inhibiting gene expression.

[0078] Plaetinck et al., International PCT Publication No. WO 00/01846, describe certain methods for identifying specific genes responsible for conferring a particular phenotype in a cell using specific dsRNA molecules.

[0079] Mello et al., International PCT Publication No. WO 01/29058, describe the identification of specific genes involved in dsRNA-mediated RNAi.

[0080] Deschamps Depaillette et al., International PCT Publication No. WO 99/07409, describe specific compositions consisting of particular dsRNA molecules combined with certain anti-viral agents.

[0081] Waterhouse et al., International PCT Publication No. 99/53050, describe certain methods for decreasing the phenotypic expression of a nucleic acid in plant cells.

[0082] Driscoll et al., International PCT Publication No. WO 01/49844, describe specific DNA constructs for use in facilitating gene silencing in targeted organisms.

[0083] Parrish et al., 2000, Molecular Cell, 6, 1977-1087, describe specific chemically-modified siRNA constructs targeting the unc-22 gene of C. elegans.

[0084] Grossniklaus, International PCT Publication No. WO 01/38551, describes certain methods for regulating polycomb gene expression in plants.

[0085] Churikov et al., International PCT Publication No. WO 01/42443, describe certain methods for modifying genetic characteristics of an organism.

[0086] Cogoni et al., International PCT Publication No. WO 01/53475, describe certain methods for isolating a Neurospora silencing gene and uses thereof.

[0087] Reed et al., International PCT Publication No. WO 01/68836, describe certain methods for gene silencing in plants.

[0088] Honer et al., International PCT Publication No. WO 01/70944, describe certain methods of drug screening using transgenic nematodes as Parkinson's Disease models.

[0089] Deak et al., International PCT Publication No. WO 01/72774, describe certain Drosophila-derived gene products.

[0090] Arndt et al., International PCT Publication No. WO 01/92513 describe certain methods for mediating gene suppression by using factors that enhance RNAi.

[0091] Tuschl et al., International PCT Publication No. WO 02/44321, describe certain synthetic siRNA constructs.

[0092] Pachuk et al., International PCT Publication No. WO 00/63364, and Satishchandran et al., International PCT Publication No. WO 01/04313, describe certain methods and compositions for inhibiting the function of certain oligonucleotide sequences.

[0093] Echeverri et al., International PCT Publication No. WO 02/38805, describe certain C. elegans genes identified via RNAi.

[0094] Kreutzer et al., International PCT Publications Nos. WO 02/055692, WO 02/055693, and EP 1144623 B1 describes certain methods for inhibiting gene expression using RNAi.

[0095] Graham et al., International PCT Publications Nos. WO 99/49029 and WO 01/70949, and AU 4037501 describe certain vector expressed long double stranded RNA molecules.

[0096] McSwiggen et al., PCT/US03/05028, WO 03/074654 describes RNA interference mediated inhibition of gene expression using short interfering nucleic acid (siNA), and provides a table listing thousands of mRNAs, which is believed to include hairless protein mRNA, as potential targets for such siNA.

[0097] McSwiggen et al., PCT/US03/05346, WO 03/070918 describes synthetic chemically modified small nucleic acid molecules capable of mediating RNA interference against target nucleic acid sequences. The reference reports that up to all of the nucleotides in the RNA strands can be replaced with moieities that are not ribonucleotides.

[0098] Each of the references cited above is incorporated by reference herein in its entirety.

Dsg4 and Nude Protein mRNA

[0099] Applicant's have found that RNAi can be used to inhibit translation from dsg4 and/or nude protein mRNA, resulting in hair removal or inhibition of hair growth. This hair removal generally is reversible by ceasing application of the RNAi inducing oligonucleotide, thus providing cosmetic and therapeutic methods, as well as methods useful for laboratory experimental mammals, and for dehairing in the leather industry. For long term or even permanent hair removal, such inhibition of dsg4 and/or nude mRNA can be combined with inhibition of hairless expression, e.g., using RNAi inhibition of hairless mRNA.

[0100] As indicated above, dsg4 was correlated with the lanceolate hair phenotype in rats and mice, and with human localized autosomal recessive hypotrichosis (LAH). Both conditions are characterized, in part, by sparse, fragile broken hair shafts which form a lance head at the tip. DSg4 was found to be a key mediator of keratinocyte cell adhesion in the hair follicle, coordinating the transition from proliferation to differentiation. In humans, expression occurs in the suprabasal epidermis and throughout the matrix, precortex, and IRS of the hair follicle during the anagen phase of the hair cycle.

[0101] Nude gene (also referred to as “winged helix nude” (whn), and as “forkhead box N1” (foxN1)) is a member of the winged-helix domain family of transcription factors and was correlated with the nude phenotype in rats and mice. Nude, inter alia, regulates hair keratin gene expression, with the level of expression in the hair follicle depending on the stage of the hair cycle. Nude expression peaks in anagen (growth phase), but is absent in telogen (resting phase).

[0102] Thus, inhibition of dgs4 and/or nude expression in the hair follicle provides a method for inhibiting hair growth or removing hair in an area on a mammal, e.g., a human.

[0103] The Hairless Protein gene is expressed during a narrow window during the hair cycle, just at the transition to catagen (the regression phase). (Panteleyev et al. 1998, Exp Dermatol. 7:249-67; Panteleyev et al. 2000, Am J Pathol. 157:1071-9). In both humans and mice with mutations in the hairless gene, the cardinal finding is a wave of hair shedding shortly after birth, and no subsequent hair growth throughout life. The phenotype results from permanent structural damage to the hair follicle, after which no further hair cycling can occur. In addition, humans and mice which are genetically deficient in hairless gene expression exhibit no other phenotypic manifestations or abnormalities that might be associated with a deleterious effect (Zlotogorski et al., 2002, J Invest Dermatol. 118:887-90), suggesting that hairless is specifically involved and indispensable in regulating the hair cycle, and that its functions elsewhere in the body (if any) are compensated by other factors.

[0104] As a result, hair removal using RNAi targeted to hairless mRNA provides an advantageous approach, as any inadvertent, non-localized inhibition of hairless mRNA will not adversely affect the subject. Inhibition of the hairless is also described in WO 99/38965 (PCT/US99/02128) and in U.S. provisional application Ser. No. 60/565,127 filed Apr. 23, 2004, each of which is incorporated by reference herein in its entirety.

C. Applications and Conditions to be Treated

[0105] As indicated above, the present invention concerns inhibition of hair growth, and consequent hair removal, and is applicable to a number of different therapeutic, cosmetic, and industrial applications. The methods can be readily adapted to any of the various mammals having dsg4, nude, and/or hairless protein analogs, for example, human, mouse, rat, cattle (and other bovines), equines.

[0106] 1. Temporary Hair Removal

[0107] Temporary, or reversible, hair removal is particularly applicable to cosmetic applications, but can also be used in other contexts. For such temporary removal, inhibition of dsg4, or nude, or both can be used, e.g., as described herein. Inhibition of these genes results in inhibition of hair growth

[0108] 2. Long Term (Permanent) Hair Removal

[0109] Permanent, or at least long term, hair removal can involve inhibition of hairless protein expression. As described, inhibition of hairless results in degradation of the hair follicles, preventing hair growth. Such hairless inhibition can be used in conjunction with inhibition of dsg4 and/or nude to inhibit growth at residual hair follicles.

[0110] 3. Exemplary Hair Removal Applications

[0111] Hair removal, either temporary or permanent, is useful for both cosmetic and therapeutic applications. Exemplary cosmetic applications can include, for example, back and chest hair for men, and upper lip, eyebrow, leg, arm, underarm, and pubic hair for women.

[0112] In addition to cosmetic applications, permanent or long term hair removal is also useful in certain conditions, e.g., trachoma, the various forms of hypertrichosis, and hirsutism.

[0113] Hypertrichosis

[0114] Hypertrichosis describes all forms of hair growth that are excessive for the bodily location and age of an individual, and which do not result from androgen stimulation. The present invention can be used for the various forms and causes of hypertrichosis, e.g., those described herein.

[0115] Hypertrichosis is usually categorized on the basis of the age of onset (at birth or during later years), the extent of distribution (universal or localized), the site of involvement (elbows, anterior or posterior neck), and the cause (genetic or acquired).

[0116] Acquired hypertrichosis may result from the use of particular drugs, for example, oral minoxidil, phenytoin, and cyclosporin. Acquired hypertrichosis lanuginosa may also be a manifestation of an underlying malignancy. In the dermatological literature, this is known as “malignant down”. Additional causes of acquired hypertrichosis include hormonal imbalances, malnutrition, HIV and local inflammation.

[0117] In addition, some forms of hypertrichosis are clearly hereditary but the genes involved generally remain unknown. Genetic forms of hypertrichosis are very rare human disorders.

[0118] There are only a small number of human disorders that have generalized congenital hypertrichosis as the leading phenotypic feature. These include:

[0119] Hypertrichosis universalis (MIM145700)

[0120] Hypertrichosis universalis congenita, Ambras type (MIM145701)

[0121] Gingival fibromatosis with hypertrichosis (MIM135400)

[0122] Barber-Say syndrome (MIM209885)

[0123] Amaurosis congenita, cone-rod type, with hypertrichosis (MIM204110),

[0124] CAHMR syndrome (MIM21770)

[0125] Cantu syndrome (MIM239850)

[0126] Gingival fibromatosis with hypertrichosis and mental retardation MIM605400)

[0127] X-linked hypertrichosis (MIM307150)

[0128] Acromegaly and hypertrichosis (Irvine et al, 1996).

[0129] Of these, only Hypertrichosis universalis, Ambras type hypertrichosis, and X-linked hypertrichosis have excessive hair as the predominant feature. In all the other listed syndromes hypertrichosis is associated with additional more prominent abnormalities. The present invention can be used to treat hypertrichosis, e.g., in any of the conditions listed above, as well as in other conditions in which trichosis occurs.

[0130] Trachoma

[0131] Trachoma is the leading cause of blindness worldwide. The World Health Organization estimates that there are 146 million people with trachoma and that the disease has caused blindness in 5.9 million people, 15% of the world's blindness. Trachoma is caused by the gram-negative bacterium Clamydia trachomatis, an intracellular parasite transmitted by fly infestation. In trachoma, the conjunctival lining of the eyelids becomes infected with the bacterium, which over the long term, causes an inflammatory response. The inflammation can lead to scarring, shortening of the lid and in-turning of the eyelashes. Trichiasis, the condition when eyelashes rub on the cornea, can lead to blindness. An estimated 10.6 million adults have inturned eyelashes that require surgery.

[0132] While it is advantageous of the Chlamydia infection is prevented, or treated before in-turning of the eyelashes, there is a need for non-surgical approaches to treatment that can at least reduce the corneal scarring. Thus, removal of the eyelash hairs (without leaving stubble) using the present invention can substantially slow, or even prevent such corneal damage, thereby preserving the individual's vision.

[0133] Trichiasis

[0134] In addition to trachoma, in-turned eyelashes (trichiasis) can have other causes, and are a common source of recurrent ocular irritation for some patients. The in-turned lash (or lashes) in contact with the conjunctiva and/or cornea may lead to a foreign body sensation, localized conjunctival injection, pain and photophobia.

[0135] Trichiasis is the term used for misdirection or aberrant placement of eyelashes along the eyelid margin resulting in lash growth toward the cornea. Trichiasis is an acquired condition that may be caused by the following inflammatory or traumatic processes involving the eyelids. The present invention can be used in all cases of trichiasis, including those in the following causal situations:

[0136] Chronic blepharitis with meibomianitis—chronic inflammatory changes within the tarsal plate and posterior eyelid margin may cause destruction and misdirection of lash follicles, resulting in chronic trichiasis.

[0137] Lid lacerations and thermal burns to the lid margin—may cause redirection of the lash roots with resultant trichiasis.

[0138] Previous surgery on eyelids—For example, lid adhesions (tarsorrhaphys) done to prevent exposure in some patients with seventh nerve palsies may cause misdirection of lashes. Similarly, in many reconstructive eyelid procedures, the new eyelid margin may contain fine skin hairs (lanugo-type) that rub on the cornea.

[0139] Mucocutaneous diseases—Stevens-Johnson syndrome and Ocular Cicatricial Pemphigoid result not only in the destruction of the eyelid margins and trichiasis but also in the formation of new lashes from the meibomian gland orifices (a condition referred to as distichiasis).

[0140] Other cicatricial conjunctival diseases—Herpes Simplex conjunctivitis and Herpes Zoster may cause a cicatrizing conjunctivitis with destruction of the lid margin and lash follicles. Trachoma may also cause a chronic tarsitis with cicatrizing conjunctivitis in the upper or lower eyelid and resultant trichiasis (as well as a cicatricial entropion).

[0141] Irradiation and chemical burns—Therapeutic irradiation for eyelid cancers or alkali burns may lead to a disruption of the normal eyelid margin anatomy and resultant misdirection of eyelashes. Both of these processes may also lead to metaplasia of squamous epithelium of the mucocutaneous margin of the eyelid with resultant keratinization, a source of ocular irritation. In addition, destruction of the goblet cells, accessory lacrimal glands, and lacrimal gland will disrupt the normal tear flow, compounding the above problems.

[0142] Other conditions in which eyelashes contact the cornea also exist, and the present invention can be used in those cases also. For example:

[0143] A condition similar to trichiasis is Eyelid entropion—True entropion (e.g. involutional type seen in the aging population) is characterized by a normal eyelid margin architecture: the eyelid inverts as a result of eyelid laxity, allowing the eyelashes to rub on the cornea. Several of the entities mentioned above (Ocular Pemphigoid, Stevens-Johnson Syndrome) may cause a cicatrization of the conjunctiva as well as the lid margin and create a cicatricial entropion with trichiasis (i.e. the eyelid is inverted due to a cicatricial process). In addition, eyelashes may be misdirected not only due to the lid position, but also due to the inflammatory process involving the actual lash follicles. Therefore, sometimes there may be two problems present (entropion and trichiasis) both of which may require treatment.

[0144] Epiblepharon—Epiblepharon is a congenital condition commonly seen in the lower Asian eyelid. A fold of skin and muscle roll upwards and presses the lashes toward the cornea. This does not represent true trichiasis.

[0145] Distichiasis—is an abnormality in which an aberrant second row of lashes, (usually from the meibomian gland orifices) grows behind the normal lash line. It may be congenital or acquired. Any process causing chronic inflammation of the lid margin and meibomian glands may transform the meibomian glands into pilosebaceous units capable of producing hair (e.g. chronic blepharitis).

[0146] Combined eyelid margin process—Several of the eyelid processes mentioned (Stevens-Johnson syndrome, Ocular Pemphigoid, irradiation, chemical burns) not only may cause entropion and trichiasis, but in addition may lead to squamous metaplasia and keratinization of the non-keratinizing squamous epithelium of the eyelid margin. Keratinized tissue is very irritating to the eye. Therefore, several factors may contribute to the ocular irritation, and as a result, several types of treatment could be required.

[0147] Marginal entropion—Is a subtle form of entropion that is seen only at the lid margin. Usually there is chronic inflammation at the eyelid margin with a mild cicatricial process that is starting to roll the lid margin inward. The eyelashes appear more vertical with some truly trichiatic lashes. The clinical clue is the meibomian gland orifices. Normally they should be vertical and not covered by conjunctival epithelium. If the openings are rolled inward and conjunctiva is growing over the opening, then marginal entropion is present in addition to trichiasis. It is important to distinguish this condition when considering treatment.

[0148] Hirsutism

[0149] Hirsutism is excessive hair growth on a female in a male growth pattern, typically excessive facial hair. Hirsutism is usually caused by an increased sensitivity of the skin to a group of hormones called androgens (testosterone and androstenedione) or increased production of these hormones. Androgen disorders (hyperandrogenism) affects between 5% to 10% of all women. Hair from this condition can be removed in full or part using the present invention.

[0150] Pseudofolliculitis Barbae

[0151] Pseudofolliculitis barbae (razor bumps) is a common condition of the beard area occurring in African American men and other people with curly hair. The problem results when highly curved hairs grow back into the skin causing inflammation and a foreign body reaction. Over time, this can cause keloidal scarring which looks like hard bumps of the beard area and neck. Currently this is usually addressed by attempting to prevent the hair from curving back and growing into the skin with altered shaving practices and the like. The present invention can be used to eliminate hairs causing such difficulties.

[0152] Experimental Animals

[0153] Permanent hair removal as described herein can also be used with experimental animals to remove hair from all or a portion of the body of an experimental animal. Thus, for example, a hairless spot can be created on a mouse, rat, sheep, monkey, chimpanzee, rabbit or other animal for application over an extended period of time of topically applied pharmaceutical compounds or other materials. Thus, the present invention can be used for this purpose, either with or without shaving shaving, waxing, or depilation, or other such treatment. In some cases, the hairless spot or area on the animal is initially created with shaving, waxing, or other hair removal method, and the present invention allows the bare area to be maintained (which may be after a sustained period of application of the present compositions, e.g., at least 2, 4, 7, or 10 days, or 2, 3, 4, 5, 6, 8, 10, 12, weeks or even longer).

[0154] Industrial Applications

[0155] In addition, permanent hair removal as described herein can also be useful to remove hair from mammals whose hides will be used for leather. Dehairing is one of the main initial steps in leather production. Five methods of dehairing are commonly used: i.e., (i) clipping process, (ii) scalding process, (iii) chemical process, (iv) sweating process, and (v) enzymatic process. Of these, the most commonly practiced method of dehairing of hides and skins is the chemical process using lime and sodium sulphide. However, the use of high concentrations of lime and sodium sulphide creates an extremely alkaline environment resulting in the pulping of hair and its subsequent removal, and presents substantial pollution problems. Thus, removal of hairs using the present invention allows hides to be prepared for leather production while eliminating or at least reducing the use of the pollution-causing methods.

D. Use of RNAi and Oligo Sequences

[0156] The use of RNAi to reduce or eliminate translation from a targeted mRNA has been described in a number of patents and published patent applications, e.g., as mentioned in the Background of the Invention. In the present invention, particular target sites in dsg4, nude, and/or hairless protein mRNA can be identified experimentally and/or using software programs to identify accessible sites. For example, procedures such as those described below can be used to identify sites, and to select an optimal site and active oligonucleotide.

[0157] Identification of Potential RNAi (e.g., siRNA) Target Sites in any RNA Sequence

[0158] The sequence of an RNA target of interest, such as a viral or human mRNA transcript, is screened for target sites, for example by using a computer folding algorithm. In a non-limiting example, the sequence of a gene or RNA gene transcript derived from a database, such as GenBank, is used to generate siNA targets having complementarity to the target. Such sequences can be obtained from a database, or can be determined experimentally as known in the art. Target sites that are known, for example, those target sites determined to be effective target sites based on studies with other nucleic acid molecules, for example ribozymes or antisense, or those targets known to be associated with a disease or condition such as those sites containing mutations or deletions, can be used to design siNA molecules targeting those sites as well. Various parameters can be used to determine which sites are the most suitable target sites within the target RNA sequence. These parameters include but are not limited to secondary or tertiary RNA structure, the nucleotide base composition of the target sequence, the degree of homology between various regions of the target sequence, or the relative position of the target sequence within the RNA transcript. Based on these determinations, any number of target sites within the RNA transcript can be chosen to screen siNA molecules for efficacy, for example by using in vitro RNA cleavage assays, cell culture, or animal models. In a nonlimiting example, anywhere from 1 to 1000 target sites are chosen within the transcript based on the size of the siNA contruct construct to be used. High throughput screening assays can be developed for screening siNA molecules using methods known in the art, such as with multi-well or multi-plate assays or combinatorial/siNA library screening assays to determine efficient reduction in target gene expression.

[0159] Computer programs to predict siRNA target sites are available for free or for purchase and can be used for initial identification of prospective target sites. In addition, certain oligo production companies provide on-line access to such programs; such services can also be used.

[0160] Selection of siNA Molecule Target Sites in a RNA

[0161] The following non-limiting steps can be used to carry out the selection of siNAs targeting a given gene sequence or transcript.
[0162] 1 The target sequence is parsed in silico into a list of all fragments or subsequences of a particular length, for example 23 nucleotide fragments, contained within the target sequence. This step is typically carried out using a custom Perl script, but commercial sequence analysis programs such as Oligo, MacVector, or the GCG Wisconsin Package can be employed as well.
[0163] 2 In some instances the siNAs correspond to more than one target sequence; such would be the case for example in targeting different transcripts of the same gene, targeting different transcripts of more than one gene, or for targeting both the human gene and an animal homolog. In this case, a subsequence list of a particular length is generated for each of the targets, and then the lists are compared to find matching sequences in each list. The subsequences are then ranked according to the number of target sequences that contain the given subsequence; the goal is to find subsequences that are present in most or all of the target sequences. Alternately, the ranking can identify subsequences that are unique to a target sequence, such as a mutant target sequence. Such an approach would enable the use of siNA to target specifically the mutant sequence and not effect the expression of the normal sequence.
[0164] 3 In some instances the siNA subsequences are absent in one or more sequences while present in the desired target sequence; such would be the case if the siNA targets a gene with a paralogous family member that is to remain untargeted. As in case 2 above, a subsequence list of a particular length is generated for each of the targets, and then the lists are compared to find sequences that are present in the target gene but are absent in the untargeted paralog.
[0165] 4. The ranked siNA subsequences can be further analyzed and ranked according to GC content. A preference can be given to sites containing 30-70% GC, with a further preference to sites containing 40-60% GC.
[0166] 5. The ranked siNA subsequences can be further analyzed and ranked according to self-folding and internal hairpins. Weaker internal folds are preferred; strong hairpin structures are to be avoided.
[0167] 6. The ranked siNA subsequences can be further analyzed and ranked according to whether they have runs of GGG or CCC in the sequence. GGG (or even more Gs) in either strand can make oligonucleotide synthesis problematic and can potentially interfere with RNAi activity, so it is avoided whenever better sequences are available. CCC is searched in the target strand because that will place GGG in the antisense strand.
[0168] 7. The ranked siNA subsequences can be further analyzed and ranked according to whether they have the dinucleotide UU (uridine dinucleotide) on the 3′-end of the sequence, and/or AA on the 5′-end of the sequence (to yield 3′ UU on the antisense sequence). These sequences allow one to design siNA molecules with terminal TT thymidine dinucleotides.
[0169] 8. Four or five target sites are chosen from the ranked list of subsequences as described above. For example, in subsequences having 23 nucleotides, the right 21 nucleotides of each chosen 23-mer subsequence are then designed and synthesized for the upper (sense) strand of the siNA duplex, while the reverse complement of the left 21 nucleotides of each chosen 23-mer subsequence are then designed and synthesized for the lower (antisense) strand of the siNA duplex. If terminal TT residues are desired for the sequence (as described in paragraph 7), then the two 3′ terminal nucleotides of both the sense and antisense strands are replaced by TT prior to synthesizing the oligos.
[0170] 9. The siNA molecules are screened in an in vitro, cell culture or animal model system to identify the most active siNA molecule or the most preferred target site within the target RNA sequence.

[0171] In an alternate approach, a pool of siNA constructs specific to a target sequence is used to screen for target sites in cells expressing target RNA, such as human lung HeLa cells. A non-limiting example of such as pool is a pool comprising sequences having antisense sequences complementary to the target RNA sequence and sense sequences complementary to the antisense sequences. Cells (e.g., HeLa cells) expressing the target gene are transfected with the pool of siNA constructs and cells that demonstrate a phenotype associated with gene silencing are sorted. The pool of siNA constructs can be chemically modified as described herein and synthesized, for example, in a high throughput manner. The siNA from cells demonstrating a positive phenotypic change (e.g., decreased target mRNA levels or target protein expression), are identified, for example by positional analysis within the assay, and are used to determine the most suitable target site(s) within the target RNA sequence based upon the complementary sequence to the corresponding siNA antisense strand identified in the assay.

[0172] Exemplary siNA Design

[0173] siNA target sites are chosen by analyzing sequences of the target RNA target and optionally prioritizing the target sites on the basis of folding (structure of any given sequence analyzed to determine siNA accessibility to the target), by using a library of siNA molecules as described, or alternately by using an in vitro siNA system as described herein. siNA molecules were designed that could bind each target and are optionally individually analyzed by computer folding to assess whether the siNA molecule can interact with the target sequence. Varying the length of the siNA molecules can be chosen to optimize activity. Generally, a sufficient number of complementary nucleotide bases are chosen to bind to, or otherwise interact with, the target RNA, but the degree of complementarity can be modulated to accommodate siNA duplexes or varying length or base composition. By using such methodologies, siNA molecules can be designed to target sites within any known RNA sequence, for example those RNA sequences corresponding to the any gene transcript.

[0174] Chemically modified siNA constucts constructs are designed to provide nuclease stability for systemic administration in vivo and/or improved pharmacokinetic, localization, and delivery properties while preserving the ability to mediate RNAi activity. Chemical modifications as described herein are introduced synthetically using synthetic methods described herein and those generally known in the art. The synthetic siNA constructs are then assayed for nuclease stability in serum and/or cellular/tissue extracts (e.g. liver extracts). The synthetic siNA constructs are also tested in parallel for RNAi activity using an appropriate assay, such as a luciferase reporter assay as described herein or another suitable assay that can quantity RNAi activity. Synthetic siNA constructs that possess both nuclease stability and RNAi activity can be further modified and re-evaluated in stability and activity assays. The chemical modifications of the stabilized active siNA constructs can then be applied to any siNA sequence targeting any chosen RNA and used, for example, in target screening assays to pick lead siNA compounds for therapeutic development.

[0175] RNAi In Vitro Assay to Assess siNA Activity

[0176] An in vitro assay that recapitulates RNAi in a cell free system is used to evaluate siNA constructs specific to target RNA. The assay comprises the system described by Tuschl et al., 1999, Genes and Development, 13, 3191-3197 and Zamore et al., 2000, Cell, 101, 25-33 adapted for use with a specific target RNA. A Drosophila extract derived from syncytial blastoderm is used to reconstitute RNAi activity in vitro. Target RNA is generated via in vitro transcription from an appropriate plasmid using T7 RNA polymerase or via chemical synthesis as described herein. Sense and antisense siNA strands (for example 20 uM each) are annealed by incubation in buffer (such as 100 mM potassium acetate, 30 mM HEPES-KOH, pH 7.4, 2 mM magnesium acetate) for 1 min. at 90° C. followed by 1 hour at 37° C., then diluted in lysis buffer (for example 100 mM potassium acetate, 30 mM HEPES-KOH at pH 7.4, 2 mM magnesium acetate). Annealing can be monitored by gel electrophoresis on an agarose gel in TBE buffer and stained with ethidium bromide. The Drosophila lysate is prepared using zero to two hour old embryos from Oregon R flies collected on yeasted molasses agar that are dechorionated and lysed. The lysate is centrifuged and the supernatant isolated. The assay comprises a reaction mixture containing 50% lysate [vol/vol], RNA (10-50 pM final concentration), and 10% [vol/vol] lysis buffer containing siNA (10 nM final concentration). The reaction mixture also contains 10 mM creatine phosphate, 10 ug.ml creatine phosphokinase, 100 um GTP, 100 uM UTP, 100 uM CTP, 500 uM ATP, 5 mM DTT, 0.1 U/uL RNasin (Promega), and 100 uM of each amino acid. The final concentration of potassium acetate is adjusted to 100 mM. The reactions are pre-assembled on ice and preincubated at 25° C. for 10 minutes before adding RNA, then incubated at 25° C. for an additional 60 minutes. Reactions are quenched with 4 volumes of 1.25×Passive Lysis Buffer (Promega). Target RNA cleavage is assayed by RT-PCR analysis or other methods known in the art and are compared to control reactions in which siNA is omitted from the reaction.

[0177] Alternately, internally-labeled target RNA for the assay is prepared by in vitro transcription in the presence of [a-³²p] CTP, passed over a G 50 Sephadex column by spin chromatography and used as target RNA without further purification. Optionally, target RNA is 5′-³²P-end labeled using T4 oligonucleotide kinase enzyme. Assays are performed as described above and target RNA and the specific RNA cleavage products generated by RNAi are visualized on an autoradiograph of a gel. The percentage of cleavage is determined by Phosphor Imager® quantitation of bands representing intact control RNA or RNA from control reactions without siNA and the cleavage products generated by the assay.

[0178] In one embodiment, this assay is used to determine target sites in the RNA target for siNA mediated RNAi cleavage, wherein a plurality of siNA constructs are screened for RNAi mediated cleavage of the RNA target, for example by analyzing the assay reaction by electrophoresis of labeled target RNA, or by northern blotting, as well as by other methodology well known in the art.

[0179] Specific dsg4 and nude protein target sequences and the complementary sequences are provided as 19-mers in Table 1 (SEQ ID NOs: 1-3561; SEQ ID NOs: 3562-7122 for complementary sequences) and Table 5 (SEQ ID NOs: 7123-9801; SEQ ID NOs: 9802-12,480 for complementary sequences), respectively, following the Examples. In the tables, the oligo number (SEQ ID NO:, first column on the left), e.g., 1, 2, 3, etc. matches the 1st (5′) nucleotide in the reference sense cDNA sequence. Thus, Oligonucleotide 1 (i.e., SEQ ID NO: 1) in Table 1 begins at nucleotide 1 in the reference human dsg4 cDNA sequence, Oligonucleotide 2 (i.e., SEQ ID NO:2), begins at nucleotide 2 in the reference sequence, and so on. Thus, one skilled in the art recognizes that the nucleotide position of each nucleotide in each oligonucleotide in Table 1 is specified as if each nucleotide were marked with the respective number. Table 5 is constructed in the same manner for the reference human nude cDNA sequence.

[0180] The sequences shown in Table 1 and Table 5 are provided as DNA sequences, but one skilled in the art understands that Table 1 and Table 5 also describes the matching RNA sequences. One skilled in the art understands that the RNA sequence has a U replacing each T shown in the DNA sequence.

[0181] While oligonucleotides are shown in Tables 1 and [[6]]5 as 19-mers, this description expressly includes the additional 20-mer, 21-mer, 22-mer, 23-mer, 24-mer, 25-mer, 26-mer, 27-mer, 28-mer, and 29-mer oligonucleotides as if they were included in the table. The sequence descriptions of those 20-29-mers is provided by taking a starting 19-mer that has the same 5′-nucleotide as the respective 20-29-mer, and adding the next 1, 2, 3, 4, 5, 6, 7, 8, 9, or 10 3′-nucleotides from the subsequent 19-mer oligonucleotides from the table. Thus, for example, the dsg4 oligo 900 (i.e., SEQ ID NO: 900) has the sequence 5′-TAGAATCAAGGTTTTAGAC-3′ (SEQ ID NO:900) and the complementary 19-mer has the sequence

| | |
|---|---|
| 5′-GTCTAAAACCTTGATTCTA-3′. | (SEQ ID NO: 4461) |

[0182] Further, a 20-mer RNA that includes the Oligonucleotide 900 sequence is described by the Oligo 900 sequence with the next nucleotide 3′, i.e., the 3′-terminal G from Oligo 901. Thus, the 20-mer RNA described has the sequence 5′-TAGAATCAAGGTTTTAGACG-3′ (SEQ ID NO: 12,481) and the complementary 20-mer RNA described has the sequence

| | |
|---|---|
| 5′-CGTCTAAAAGCTTGATTCTA-3′. | (SEQ ID NO: 12,482) |

[0183] Similarly, a 21-mer RNA that includes the Oligonucleotide 900 sequence is described by the Oligo 900 sequence with the next two nucleotides 3′, i.e., the 3′-terminal GT from Oligo 902. Thus, the 21-mer RNA described has the sequence 5′-TAGAATCAAGGTTTTAGACGT-3′ (SEQ ID NO: 12,483) and the complementary 21-mer RNA described has the sequence

| | |
|---|---|
| 5′-ACGTCTAAAACCTTGATTCTA-3′. | (SEQ ID NO: 12,484) |

[0184] As the next oligonucleotide described, a 22-mer RNA that includes the Oligonucleotide 900 sequence is described by the Oligo 900 sequence with the next three nucleotides 3′, i.e., the 3′-terminal GTC from Oligo 903. Thus, the 22-mer RNA described has the sequence

[0185] 5′-TAGAATCAAGGTTTTAGACGTC-3′ (SEQ ID NO: 12,485) and the complementary 22-mer RNA described has the sequence

| | |
|---|---|
| 5′-GACGTCTAAAACCTTGATTCTA-3′. | (SEQ ID NO: 12,486) |

[0186] A 23-mer RNA that includes the Oligonucleotide 900 sequence is described by the Oligo 900 sequence with the next four nucleotides 3′, i.e., the 3′-terminal GTCA from Oligo 904. Thus, the 23-mer RNA described has the sequence

| | |
|---|---|
| 5′-TGACGTCTAAAACCTTGATTCTA-3′ | (SEQ ID NO: 12,487) |

[0187] and the complementary 23-mer RNA described has the sequence

| | |
|---|---|
| 5′-TGAGGGCATGGGTGATAACTGTG-3′. | (SEQ ID NO: 12,488) |

[0188] A 24-mer RNA that includes the Oligonucleotide 900 sequence is described by the Oligo 900 sequence with the next five nucleotides 3′, i.e., the 3′-terminal GTCAA from Oligo 905. Thus, the 24-mer RNA described has the sequence 5′-TAGAATCAAGGTTTTAGACGTCAA-3′ (SEQ ID NO: 12,489) and the complementary 24-mer RNA described has the sequence

| | |
|---|---|
| 5′-TTGACGTCTAAAACCTTGATTCTA-3′. | (SEQ ID NO: 12,490) |

[0189] In similar fashion, a 25-mer that includes the Oligonucleotide 900 sequence is described as

[0190] 5′-TAGAATCAAGGTTTTAGACGTCAAC-3′ (SEQ ID NO: 12,491) and the complementary 25-mer RNA described has the sequence

(SEQ ID NO: 12,492)

5′-GTTGACGTCTAAAACCTTGATTCTA-3′.

[0191] A 26-mer that includes the Oligonucleotide 900 sequence is described as 5′-TAGAATCAAGGTTTTAGACGTCAACG-3′ (SEQ ID NO: 12,493) and the complementary 26-mer RNA described has the sequence

(SEQ ID NO: 12,494)

5′-CGTTGACGTCTAAAACCTTGATTCTA-3′.

[0192] A 27-mer that includes the Oligonucleotide 900 sequence is described as 5′-TAGAATCAAGGTTTTAGACGTCAACGA-3′ (SEQ ID NO: 12,495) and the complementary 27-mer RNA described has the sequence

(SEQ ID NO: 12,496)

5′-TCGTTGACGTCTAAAACCTTGATTCTA-3′.

[0193] A 28-mer that includes the Oligonucleotide 900 sequence is described as 5′-TAGAATCAAGGTTTTAGACGTCAACGAT-3′ (SEQ ID NO: 12,497) and the complementary 28-mer RNA described has the sequence

(SEQ ID NO: 12,498)

5′-ATCGTTGACGTCTAAAACCTTGATTCTA-3′.

[0194] A 29-mer that includes the Oligonucleotide 900 sequence is described as 5′-TAGAATCAAGGTTTTAGACGTCAACGATA-3′ (SEQ ID NO: 12,499) and the complementary 29-mer RNA described has the sequence

(SEQ ID NO: 12,500)

5′-TATCGTTGACGTCTAAAACCTTGATTCTA-3′.

[0195] Thus the process can be continued in like manner for longer sequences, and/or for other positions in an mRNA, e.g., nude mRNA for which oligonucleotides are shown in Table 5.

[0196] Thus, Table 1 and likewise Table 5 describe each of the 19-mers shown in Table 1 and Table 5 as DNA and RNA, and the corresponding 20-mers and longer.

[0197] In addition, the Tables describe double stranded oligonucleotides with the sense and antisense oligonucleotide strands hybridized, as well as such double stranded oligonucleotides with one or both strands having a 3′-overhang, e.g., 1, 2, or 3 nucleotide overhang. Such an overhang consists of one or more 3′-terminal nucleotides of an oligonucleotide strand in a double stranded molecule that are not hybridized with the complementary strand. In the present case, such overhang nucleotides often match the corresponding nucleotides from the target mRNA sequence, but can be different.

[0198] Tables 1 and 6 also describe oligonucleotides that contain known polymorphisms. Those polymorphic sites are described in Table 2 along with the replacement nucleotide. Thus, Table 1 or Table 5 with Table 2 describe the oligonucleotides with the alternate nucleotides at a polymorphic site for dsg4 and nude respectively.

Chemical Modifications

[0199] As indicated above, for many applications it is advantageous to use chemically modified oligonucleotides rather than unmodified RNA for RNAi (e.g., siRNA). Such modification can dramatically increase the cellular and/or serum lifetime of the modified oligonucleotide compared to the unmodified form.

[0200] Description of such chemical modification is provided, for example, in McSwiggen et al., PCT/US03/05346, WO 03/070918. Thus, the introduction of chemically modified nucleotides into nucleic acid molecules assists in overcoming potential limitations of in vivo stability and bioavailability inherent to native RNA molecules that are delivered exogenously. For example, the use of chemically modified nucleic acid molecules can enable a lower dose of a particular nucleic acid molecule for a given therapeutic effect since chemically modified nucleic acid molecules tend to have a longer half-life in serum. Furthermore, certain chemical modifications can improve the bioavailability of nucleic acid molecules by targeting particular cells or tissues and/or improving cellular uptake of the nucleic acid molecule. Therefore, even if the activity of a chemically modified nucleic acid molecule is reduced as compared to a native nucleic acid molecule, for example when compared to an all RNA nucleic acid molecule, the overall activity of the modified nucleic acid molecule can be greater than the native molecule due to improved stability and/or delivery of the molecule. Unlike native unmodified siRNA, chemically modified siNA can also minimize the possibility of activating interferon activity in humans.

[0201] Thus, in some embodiments of the present invention, the nucleic acid molecules that act as mediators of the RNA interference gene silencing response are chemically modified double stranded nucleic acid molecules, generally about 19-29 nucleotides in length. The most active siRNA molecules are thought to have such duplexes with overhanging ends of 1-3 nucleotides, for example 21 nucleotide duplexes with 19 base pairs and 2 nucleotide 3′-overhangs. These overhanging segments are readily hydrolyzed by endonucleases in vivo. Studies have shown that replacing the 3′-overhanging segments of a 21-mer siRNA duplex having 2 nucleotide 3′ overhangs with deoxyribonucleotides does not have an adverse effect on RNAi activity. Replacing up to 4 nucleotides on each end of the siRNA with deoxyribonucleotides has been reported to be well tolerated whereas complete substitution with deoxyribonucleotides results in no RNAi activity (Elbashir et al., 2001, EMBO J., 20, 6877). In addition, Elbashir et al. also report that full substitution of siRNA with 2′-O-methyl nucleotides completely abolishes RNAi activity.

[0202] In some embodiments, the chemically modified siNA constructs having specificity for target nucleic acid molecules in a cell. Non-limiting examples of such chemical modifications include without limitation phosphorothioate internucleotide linkages, 2′-O-methyl ribonucleotides, 2′-deoxy-2′-fluoro ribonucleotides, “universal base” nucleotides, 5-C-methyl nucleotides, and inverted deoxyabasic residue incorporation. These chemical modifications, when used in various siNA constructs, are shown to preserve RNAi activity in cells while at the same time, dramatically increasing the serum stability of these compounds. Furthermore, contrary to the data published by Parrish et al., supra, applicant demonstrates that multiple (greater than one) phosphorothioate substitutions are well-tolerated and confer substantial increases in serum stability for modified siNA constructs.

[0203] In one embodiment, a siNA molecule of the invention comprises modified nucleotides while maintaining the ability to mediate RNAi. The modified nucleotides can be used to improve in vitro or in vivo characteristics such as stability, activity, and/or bioavailability. For example, a siNA molecule of the invention can comprise modified nucleotides as a percentage of the total number of nucleotides present in the siNA molecule. As such, a siNA molecule of the invention can generally comprise modified nucleotides at between 5 and 100% of the nucleotide positions (e.g., 5%, 10%, 15%, 20%, 25%, 30%, 35%, 40%, 45%, 50%, 55%, 60%, 65%, 70%, 75%, 80%, 85%, 90%, 95% or 100% of the nucleotide positions). The actual percentage of modified nucleotides present in a given siNA molecule will depend on the total number of nucleotides present in the siNA. If the siNA molecule is single stranded, the percent modification can be based upon the total number of nucleotides present in the single stranded siNA molecules. Likewise, if the siNA molecule is double stranded, the percent modification can be based upon the total number of nucleotides present in the sense strand, antisense strand, or both the sense and antisense strands. In addition, the actual percentage of modified nucleotides present in a given siNA molecule can also depend on the total number of purine and pyrimidine nucleotides present in the siNA, for example wherein all pyrimidine nucleotides and/or all purine nucleotides present in the siNA molecule are modified.

[0204] In a non-limiting example, the introduction of chemically-modified nucleotides into nucleic acid molecules will provide a powerful tool in overcoming potential limitations of in vivo stability and bioavailability inherent to native RNA molecules that are delivered exogenously. For example, the use of chemically-modified nucleic acid molecules can enable a lower dose of a particular nucleic acid molecule for a given therapeutic effect since chemically-modified nucleic acid molecules tend to have a longer half-life in serum. Furthermore, certain chemical modifications can improve the bioavailability of nucleic acid molecules by targeting particular cells or tissues and/or improving cellular uptake of the nucleic acid molecule. Therefore, even if the activity of a chemically-modified nucleic acid molecule is reduced as compared to a native nucleic acid molecule, for example when compared to an all-RNA nucleic acid molecule, the overall activity of the modified nucleic acid molecule can be greater than that of the native molecule due to improved stability and/or delivery of the molecule. Unlike native unmodified siNA, chemically-modified siNA can also minimize the possibility of activating interferon activity in humans.

[0205] The antisense region of a siNA molecule of the invention can comprise a phosphorothioate internucleotide linkage at the 3′-end of said antisense region. The antisense region can comprise between about one and about five phosphorothioate internucleotide linkages at the 5′-end of said antisense region. The 3′-terminal nucleotide overhangs of a siNA molecule of the invention can comprise ribonucleotides or deoxyribonucleotides that are chemically-modified at a nucleic acid sugar, base, or backbone. The 3′-terminal nucleotide overhangs can comprise one or more universal base ribonucleotides. The 3′-terminal nucleotide overhangs can comprise one or more acyclic nucleotides.

[0206] In certain embodiments, the chemically-modified short interfering nucleic acid (siNA) molecule capable of mediating RNA interference (RNAi) inside a cell or reconstituted in vitro system, includes one or more chemically modified nucleotides (e.g., about 1, 2, 3, 4, 5, 6, 7, 8, 9, 10, or more) comprising a backbone modified internucleotide linkage having Formula I: [chemical structure]
wherein each R1 and R2 is independently any nucleotide, non-nucleotide, or oligonucleotide which can be naturally-occurring or chemically-modified, each X and Y is independently O, S, N, alkyl, or substituted alkyl, each Z and W is independently O, S, N, alkyl, substituted alkyl, O-alkyl, S-alkyl, alkaryl, or aralkyl, and wherein W, X, Y, and Z are optionally not all O.

[0207] The chemically-modified internucleotide linkages having Formula I, for example wherein any Z, W, X, and/or Y independently comprises a sulphur atom, can be present in one or both oligonucleotide strands of the siNA duplex, for example in the sense strand, the antisense strand, or both strands. The siNA molecules of the invention can comprise one or more (e.g., about 1, 2, 3, 4, 5, 6, 7, 8, 9, 10, or more) chemically-modified internucleotide linkages having Formula I at the 3′-end, the 5′-end, or both of the 3′ and 5′-ends of the sense strand, the antisense strand, or both strands. For example, an exemplary siNA molecule of the invention can comprise between about 1 and about 5 or more (e.g., about 1, 2, 3, 4, 5, or more) chemically-modified internucleotide linkages having Formula I at the 5′-end of the sense strand, the antisense strand, or both strands. In another non-limiting example, an exemplary siNA molecule of the invention can comprise one or more (e.g., about 1, 2, 3, 4, 5, 6, 7, 8, 9, 10, or more) pyrimidine nucleotides with chemically-modified internucleotide linkages having Formula I in the sense strand, the antisense strand, or both strands. In yet another non-limiting example, an exemplary siNA molecule of the invention can comprise one or more (e.g., about 1, 2, 3, 4, 5, 6, 7, 8, 9, 10, or more) purine nucleotides with chemically-modified internucleotide linkages having Formula I in the sense strand, the antisense strand, or both strands. In another embodiment, a siNA molecule of the invention having internucleotide linkage(s) of Formula I also comprises a chemically-modified nucleotide or non-nucleotide having any of Formulae I-VII.

[0208] In one embodiment, the invention features a chemically-modified short interfering nucleic acid (siNA) molecule capable of mediating RNA interference (RNAi) inside a cell or reconstituted in vitro system, wherein the chemical modification comprises one or more (e.g., about 1, 2, 3, 4, 5, 6, 7, 8, 9, 10, or more) nucleotides or non-nucleotides having Formula II: [chemical structure]
wherein each R3, R4, R5, R6, R7, R8, R10, R11 and R12 is independently H, OH, alkyl, substituted alkyl, alkaryl or aralkyl, F, Cl, Br, CN, CF3, OCF3, OCN, O-alkyl, S-alkyl, N-alkyl, O-alkenyl, S-alkenyl, N-alkenyl, SO-alkyl, alkyl-OSH, alkyl-OH, O-alkyl-OH, O-alkyl-SH, S-alkyl-OH, S-alkyl-SH, alkyl-S-alkyl, alkyl-O-alkyl, ONO2, NO2, N3, NH2, aminoalkyl, aminoacid, aminoacyl, ONH2, O-aminoalkyl, O-aminoacid, O-aminoacyl, heterocycloalkyl, heterocycloalkaryl, aminoalkylamino, polyalklylamino, substituted silyl, or group having Formula I; R9 is O, S, CH2, S═O, CHF, or CF2, and B is a nucleosidic base such as adenine, guanine, uracil, cytosine, thymine, 2-aminoadenosine, 5-methylcytosine, 2,6-diaminopurine, or any other non-naturally occurring base that can be complementary or non-complementary to target RNA or a non-nucleosidic base such as phenyl, naphthyl, 3-nitropyrrole, 5-nitroindole, nebularine, pyridone, pyridinone, or any other non-naturally occurring universal base that can be complementary or non-complementary to target RNA.

[0209] The chemically-modified nucleotide or non-nucleotide of Formula II can be present in one or both oligonucleotide strands of the siNA duplex, for example in the sense strand, the antisense strand, or both strands. The siNA molecules of the invention can comprise one or more chemically-modified nucleotide or non-nucleotide of Formula II at the 3′-end, the 5′-end, or both of the 3′ and 5′-ends of the sense strand, the antisense strand, or both strands. For example, an exemplary siNA molecule of the invention can comprise between about 1 and about 5 or more (e.g., about 1, 2, 3, 4, 5, or more) chemically-modified nucleotides or non-nucleotides of Formula II at the 5′-end of the sense strand, the antisense strand, or both strands. In anther non-limiting example, an exemplary siNA molecule of the invention can comprise between about 1 and about 5 or more (e.g., about 1, 2, 3, 4, 5, or more) chemically-modified nucleotides or non-nucleotides of Formula II at the 3′-end of the sense strand, the antisense strand, or both strands.

[0210] In one embodiment, the invention features a chemically-modified short interfering nucleic acid (siNA) molecule capable of mediating RNA interference (RNAi) inside a cell or reconstituted in vitro system, wherein the chemical modification comprises one or more (e.g., about 1, 2, 3, 4, 5, 6, 7, 8, 9, 10, or more) nucleotides or non-nucleotides having Formula III: [chemical structure]
wherein each R3, R4, R5, R6, R7, R8, R10, R11 and R12 is independently H, OH, alkyl, substituted alkyl, alkaryl or aralkyl, F, Cl, Br, CN, CF3, OCF3, OCN, O-alkyl, S-alkyl, N-alkyl, O-alkenyl, S-alkenyl, N-alkenyl, SO-alkyl, alkyl-OSH, alkyl-OH, O-alkyl-OH, O-alkyl-SH, S-alkyl-OH, S-alkyl-SH, alkyl-S-alkyl, alkyl-O-alkyl, ONO2, NO2, N3, NH2, aminoalkyl, aminoacid, aminoacyl, ONH2, O-aminoalkyl, O-aminoacid, O-aminoacyl, heterocycloalkyl, heterocycloalkaryl, aminoalkylamino, polyalklylamino, substituted silyl, or group having Formula I; R9 is O, S, CH2, S═O, CHF, or CF2, and B is a nucleosidic base such as adenine, guanine, uracil, cytosine, thymine, 2-aminoadenosine, 5-methylcytosine, 2,6-diaminopurine, or any other non-naturally occurring base that can be employed to be complementary or non-complementary to target RNA or a non-nucleosidic base such as phenyl, naphthyl, 3-nitropyrrole, 5-nitroindole, nebularine, pyridone, pyridinone, or any other non-naturally occurring universal base that can be complementary or non-complementary to target RNA.

[0211] The chemically-modified nucleotide or non-nucleotide of Formula III can be present in one or both oligonucleotide strands of the siNA duplex, for example in the sense strand, the antisense strand, or both strands. The siNA molecules of the invention can comprise one or more chemically-modified nucleotide or non-nucleotide of Formula III at the 3′-end, the 5′-end, or both of the 3′ and 5′-ends of the sense strand, the antisense strand, or both strands. For example, an exemplary siNA molecule of the invention can comprise between about 1 and about 5 or more (e.g., about 1, 2, 3, 4, 5, or more) chemically-modified nucleotide(s) or non-nucleotide(s) of Formula III at the 5′-end of the sense strand, the antisense strand, or both strands. In anther non-limiting example, an exemplary siNA molecule of the invention can comprise between about 1 and about 5 or more (e.g., about 1, 2, 3, 4, 5, or more) chemically-modified nucleotide or non-nucleotide of Formula III at the 3′-end of the sense strand, the antisense strand, or both strands.

[0212] In another embodiment, a siNA molecule of the invention comprises a nucleotide having Formula II or III, wherein the nucleotide having Formula II or III is in an inverted configuration. For example, the nucleotide having Formula II or III is connected to the siNA construct in a 3′-3′,3′-2′,2′-3′, or 5′-5′ configuration, such as at the 3′-end, the 5′-end, or both of the 3′ and 5′-ends of one or both siNA strands.

[0213] In one embodiment, the invention features a chemically-modified short interfering nucleic acid (siNA) molecule capable of mediating RNA interference (RNAi) inside a cell or reconstituted in vitro system, wherein the chemical modification comprises a 5′-terminal phosphate group having Formula IV: [chemical structure]
wherein each X and Y is independently O, S, N, alkyl, substituted alkyl, or alkylhalo; wherein each Z and W is independently O, S, N, alkyl, substituted alkyl, O-alkyl, S-alkyl, alkaryl, aralkyl, or alkylhalo; and wherein W, X, Y and Z are not all O. In one embodiment, the invention features a siNA molecule having a 5′-terminal phosphate group having Formula IV on the target-complementary strand, for example a strand complementary to a target RNA, wherein the siNA molecule comprises an all RNA siNA molecule. In another embodiment, the invention features a siNA molecule having a 5′-terminal phosphate group having Formula IV on the target-complementary strand wherein the siNA molecule also comprises about 1-3 (e.g., about 1, 2, or 3) nucleotide 3′-terminal nucleotide overhangs having between about 1 and about 4 (e.g., about 1, 2, 3, or 4) deoxyribonucleotides on the 3′-end of one or both strands. In another embodiment, a 5′-terminal phosphate group having Formula IV is present on the target-complementary strand of a siNA molecule of the invention, for example a siNA molecule having chemical modifications having any of Formulae I-VII.

[0214] In one embodiment, the invention features a chemically-modified short interfering nucleic acid (siNA) molecule capable of mediating RNA interference (RNAi) inside a cell or reconstituted in vitro system, wherein the chemical modification comprises one or more phosphorothioate internucleotide linkages. For example, in a non-limiting example, the invention features a chemically-modified short interfering nucleic acid (siNA) having about 1, 2, 3, 4, 5, 6, 7, 8 or more phosphorothioate internucleotide linkages in one siNA strand. In yet another embodiment, the invention features a chemically-modified short interfering nucleic acid (siNA) individually having about 1, 2, 3, 4, 5, 6, 7, 8 or more phosphorothioate internucleotide linkages in both siNA strands. The phosphorothioate internucleotide linkages can be present in one or both oligonucleotide strands of the siNA duplex, for example in the sense strand, the antisense strand, or both strands. The siNA molecules of the invention can comprise one or more phosphorothioate internucleotide linkages at the 3′-end, the 5′-end, or both of the 3′- and 5′-ends of the sense strand, the antisense strand, or both strands. For example, an exemplary siNA molecule of the invention can comprise between about 1 and about 5 or more (e.g., about 1, 2, 3, 4, 5, or more) consecutive phosphorothioate internucleotide linkages at the 5′-end of the sense strand, the antisense strand, or both strands. In another non-limiting example, an exemplary siNA molecule of the invention can comprise one or more (e.g., about 1, 2, 3, 4, 5, 6, 7, 8, 9, 10, or more) pyrimidine phosphorothioate internucleotide linkages in the sense strand, the antisense strand, or both strands. In yet another non-limiting example, an exemplary siNA molecule of the invention can comprise one or more (e.g., about 1, 2, 3, 4, 5, 6, 7, 8, 9, 10, or more) purine phosphorothioate internucleotide linkages in the sense strand, the antisense strand, or both strands.

[0215] In one embodiment, the invention features a siNA molecule, wherein the sense strand comprises one or more, for example about 1, 2, 3, 4, 5, 6, 7, 8, 9, 10, or more phosphorothioate internucleotide linkages, and/or one or more (e.g., about 1, 2, 3, 4, 5, 6, 7, 8, 9, 10 or more) 2′-deoxy, 2′-O-methyl, 2′-deoxy-2′-fluoro, and/or one or more (e.g., about 1, 2, 3, 4, 5, 6, 7, 8, 9, 10 or more) universal base modified nucleotides, and optionally a terminal cap molecule at the 3′end, the 5′-end, or both of the 3′- and 5′-ends of the sense strand; and wherein the antisense strand comprises any of between 1 and 10 or more, specifically about 1, 2, 3, 4, 5, 6, 7, 8, 9, 10, or more phosphorothioate internucleotide linkages, and/or one or more (e.g., about 1, 2, 3, 4, 5, 6, 7, 8, 9, 10 or more) 2′-deoxy, 2′-O-methyl, 2′-deoxy-2′-fluoro, and/or one or more (e.g., about 1, 2, 3, 4, 5, 6, 7, 8, 9, 10 or more) universal base modified nucleotides, and optionally a terminal cap molecule at the 3′-end, the 5′-end, or both of the 3′- and 5′-ends of the antisense strand. In another embodiment, one or more, for example about 1, 2, 3, 4, 5, 6, 7, 8, 9, 10, or more, pyrimidine nucleotides of the sense and/or antisense siNA strand are chemically-modified with 2′-deoxy, 2′-O-methyl and/or 2′-deoxy-2′-fluoro nucleotides, with or without one or more, for example about 1, 2, 3, 4, 5, 6, 7, 8, 9, 10, or more, phosphorothioate internucleotide linkages and/or a terminal cap molecule at the 3′-end, the 5′-end, or both of the 3′- and 5′-ends, being present in the same or different strand.

[0216] In another embodiment, the invention features a siNA molecule, wherein the sense strand comprises between about 1 and about 5, specifically about 1, 2, 3, 4, or 5 phosphorothioate internucleotide linkages, and/or one or more (e.g., about 1, 2, 3, 4, 5, or more) 2′-deoxy, 2′-O-methyl, 2′-deoxy-2′-fluoro, and/or one or more (e.g., about 1, 2, 3, 4, 5, or more) universal base modified nucleotides, and optionally a terminal cap molecule at the 3-end, the 5′-end, or both of the 3′- and 5′-ends of the sense strand; and wherein the antisense strand comprises any of between about 1 and about 5 or more, specifically about 1, 2, 3, 4, 5, or more phosphorothioate internucleotide linkages, and/or one or more (e.g., about 1, 2, 3, 4, 5, 6, 7, 8, 9, 10 or more) 2′-deoxy, 2′-O-methyl, 2′-deoxy-2′-fluoro, and/or one or more (e.g., about 1, 2, 3, 4, 5, 6, 7, 8, 9, 10 or more) universal base modified nucleotides, and optionally a terminal cap molecule at the 3′-end, the 5′-end, or both of the 3′- and 5′-ends of the antisense strand. In another embodiment, one or more, for example about 1, 2, 3, 4, 5, 6, 7, 8, 9, 10, or more, pyrimidine nucleotides of the sense and/or antisense siNA strand are chemically-modified with 2′-deoxy, 2′-O-methyl and/or 2′-deoxy-2′-fluoro nucleotides, with or without between about 1 and about 5 or more, for example about 1, 2, 3, 4, 5, or more phosphorothioate internucleotide linkages and/or a terminal cap molecule at the 3′-end, the 5′-end, or both of the 3′- and 5′-ends, being present in the same or different strand.

[0217] In one embodiment, the invention features a siNA molecule, wherein the antisense strand comprises one or more, for example about 1, 2, 3, 4, 5, 6, 7, 8, 9, 10, or more phosphorothioate internucleotide linkages, and/or between one or more (e.g., about 1, 2, 3, 4, 5, 6, 7, 8, 9, 10 or more) 2′-deoxy, 2′-O-methyl, 2′-deoxy-2′-fluoro, and/or one or more (e.g., about 1, 2, 3, 4, 5, 6, 7, 8, 9, 10 or more) universal base modified nucleotides, and optionally a terminal cap molecule at the 3′-end, the 5′-end, or both of the 3′- and 5′-ends of the sense strand; and wherein the antisense strand comprises any of between about 1 and about 10, specifically about 1, 2, 3, 4, 5, 6, 7, 8, 9, 10 or more phosphorothioate internucleotide linkages, and/or one or more (e.g., about 1, 2, 3, 4, 5, 6, 7, 8, 9, 10 or more) 2′-deoxy, 2′-O-methyl, 2′-deoxy-2′-fluoro, and/or one or more (e.g., about 1, 2, 3, 4, 5, 6, 7, 8, 9, 10 or more) universal base modified nucleotides, and optionally a terminal cap molecule at the 3′-end, the 5′-end, or both of the 3′- and 5′-ends of the antisense strand. In another embodiment, one or more, for example about 1, 2, 3, 4, 5, 6, 7, 8, 9, 10 or more pyrimidine nucleotides of the sense and/or antisense siNA strand are chemically-modified with 2′-deoxy, 2′-O-methyl and/or 2′-deoxy-2′-fluoro nucleotides, with or without one or more, for example about 1, 2, 3, 4, 5, 6, 7, 8, 9, 10 or more phosphorothioate internucleotide linkages and/or a terminal cap molecule at the 3′-end, the 5′-end, or both of the 3′ and 5′-ends, being present in the same or different strand.

[0218] In another embodiment, the invention features a siNA molecule, wherein the antisense strand comprises between about 1 and about 5 or more, specifically about 1, 2, 3, 4, 5 or more phosphorothioate internucleotide linkages, and/or one or more (e.g., about 1, 2, 3, 4, 5, 6, 7, 8, 9, 10 or more) 2′-deoxy, 2′-O-methyl, 2′-deoxy-2′-fluoro, and/or one or more (e.g., about 1, 2, 3, 4, 5, 6, 7, 8, 9, 10 or more) universal base modified nucleotides, and optionally a terminal cap molecule at the 3′-end, the 5′-end, or both of the 3′- and 5′-ends of the sense strand; and wherein the antisense strand comprises any of between about 1 and about 5 or more, specifically about 1, 2, 3, 4, 5 or more phosphorothioate internucleotide linkages, and/or one or more (e.g., about 1, 2, 3, 4, 5, 6, 7, 8, 9, 10 or more) 2′-deoxy, 2′-O-methyl, 2′-deoxy-2′-fluoro, and/or one or more (e.g., about 1, 2, 3, 4, 5, 6, 7, 8, 9, 10 or more) universal base modified nucleotides, and optionally a terminal cap molecule at the 3′-end, the 5′-end, or both of the 3′- and 5′-ends of the antisense strand. In another embodiment, one or more, for example about 1, 2, 3, 4, 5, 6, 7, 8, 9, 10 or more pyrimidine nucleotides of the sense and/or antisense siNA strand are chemically-modified with 2′-deoxy, 2′-O-methyl and/or 2′-deoxy-2′-fluoro nucleotides, with or without between about 1 and about 5, for example about 1, 2, 3, 4, 5 or more phosphorothioate internucleotide linkages and/or a terminal cap molecule at the 3′-end, the 5′-end, or both of the 3′- and 5′-ends, being present in the same or different strand.

[0219] In one embodiment, the invention features a chemically-modified short interfering nucleic acid (siNA) molecule having between about 1 and about 5, specifically about 1, 2, 3, 4, 5 or more phosphorothioate internucleotide linkages in each strand of the siNA molecule.

[0220] In another embodiment, the invention features a siNA molecule comprising 2′-5′ internucleotide linkages. The 2′-5′ internucleotide linkage(s) can be at the 3′-end, the 5′-end, or both of the 3′- and 5′-ends of one or both siNA sequence strands. In addition, the 2′-5′ internucleotide linkage(s) can be present at various other positions within one or both siNA sequence strands, for example, about 1, 2, 3, 4, 5, 6, 7, 8, 9, 10, or more including every internucleotide linkage of a pyrimidine nucleotide in one or both strands of the siNA molecule can comprise a 2′-5′ internucleotide linkage, or about 1, 2, 3, 4, 5, 6, 7, 8, 9, 10, or more including every internucleotide linkage of a purine nucleotide in one or both strands of the siNA molecule can comprise a 2′-5′ internucleotide linkage.

[0221] In another embodiment, a chemically-modified siNA molecule of the invention comprises a duplex having two strands, one or both of which can be chemically-modified, wherein each strand is between about 18 and about 27 (e.g., about 18, 19, 20, 21, 22, 23, 24, 25, 26, or 27) nucleotides in length, wherein the duplex has between about 18 and about 23 (e.g., about 18, 19, 20, 21, 22, or 23) base pairs, and wherein the chemical modification comprises a structure having any of Formulae I-VII. For example, an exemplary chemically-modified siNA molecule of the invention comprises a duplex having two strands, one or both of which can be chemically-modified with a chemical modification having any of Formulae I-VII or any combination thereof, wherein each strand consists of about 21 nucleotides, each having a 2-nucleotide 3′-terminal nucleotide overhang, and wherein the duplex has about 19 base pairs. In another embodiment, a siNA molecule of the invention comprises a single stranded hairpin structure, wherein the siNA is between about 36 and about 70 (e.g., about 36, 40, 45, 50, 55, 60, 65, or 70) nucleotides in length having between about 18 and about 23 (e.g., about 18, 19, 20, 21, 22, or 23) base pairs, and wherein the siNA can include a chemical modification comprising a structure having any of Formulae I-VII or any combination thereof. For example, an exemplary chemically-modified siNA molecule of the invention comprises a linear oligonucleotide having between about 42 and about 50 (e.g., about 42, 43, 44, 45, 46, 47, 48, 49, or 50) nucleotides that is chemically-modified with a chemical modification having any of Formulae I-VII or any combination thereof, wherein the linear oligonucleotide forms a hairpin structure having about 19 base pairs and a 2-nucleotide 3′-terminal nucleotide overhang. In another embodiment, a linear hairpin siNA molecule of the invention contains a stem loop motif, wherein the loop portion of the siNA molecule is biodegradable. For example, a linear hairpin siNA molecule of the invention is designed such that degradation of the loop portion of the siNA molecule in vivo can generate a double-stranded siNA molecule with 3′-terminal overhangs, such as 3′-terminal nucleotide overhangs comprising about 2 nucleotides.

[0222] In another embodiment, a siNA molecule of the invention comprises a circular nucleic acid molecule, wherein the siNA is between about 38 and about 70 (e.g., about 38, 40, 45, 50, 55, 60, 65, or 70) nucleotides in length having between about 18 and about 23 (e.g., about 18, 19, 20, 21, 22, or 23) base pairs, and wherein the siNA can include a chemical modification, which comprises a structure having any of Formulae I-VII or any combination thereof. For example, an exemplary chemically-modified siNA molecule of the invention comprises a circular oligonucleotide having between about 42 and about 50 (e.g., about 42, 43, 44, 45, 46, 47, 48, 49, or 50) nucleotides that is chemically-modified with a chemical modification having any of Formulae I-VII or any combination thereof, wherein the circular oligonucleotide forms a dumbbell shaped structure having about 19 base pairs and 2 loops.

[0223] In another embodiment, a circular siNA molecule of the invention contains two loop motifs, wherein one or both loop portions of the siNA molecule is biodegradable. For example, a circular siNA molecule of the invention is designed such that degradation of the loop portions of the siNA molecule in vivo can generate a double-stranded siNA molecule with 3′-terminal overhangs, such as 3′-terminal nucleotide overhangs comprising about 2 nucleotides.

[0224] In one embodiment, a siNA molecule of the invention comprises at least one (e.g., about 1, 2, 3, 4, 5, 6, 7, 8, 9, 10, or more) abasic moiety, for example a compound having Formula V: [chemical structure]
wherein each R3, R4, R5, R6, R7, R8, R10, R11, R12, and R13 is independently H, OH, alkyl, substituted alkyl, alkaryl or aralkyl, F, Cl, Br, CN, CF3, OCF3, OCN, O-alkyl, S-alkyl, N-alkyl, O-alkenyl, S-alkenyl, N-alkenyl, SO-alkyl, alkyl-OSH, alkyl-OH, O-alkyl-OH, O-alkyl-SH, S-alkyl-OH, S-alkyl-SH, alkyl-S-alkyl, alkyl-O-alkyl, ONO2, NO2, N3, NH2, aminoalkyl, aminoacid, aminoacyl, ONH2, O-aminoalkyl, O-aminoacid, O-aminoacyl, heterocycloalkyl, heterocycloalkaryl, aminoalkylamino, polyalklylamino, substituted silyl, or group having Formula I; R9 is O, S, CH2, S═O, CHF, or CF2.

[0225] In one embodiment, a siNA molecule of the invention comprises at least one (e.g., about 1, 2, 3, 4, 5, 6, 7, 8, 9, 10, or more) inverted abasic moiety, for example a compound having Formula VI: [chemical structure]
wherein each R3, R4, R5, R6, R7, R8, R10, R11, R12, and R13 is independently H, OH, alkyl, substituted alkyl, alkaryl or aralkyl, F, Cl, Br, CN, CF3, OCF3, OCN, O-alkyl, S-alkyl, N-alkyl, O-alkenyl, S-alkenyl, N-alkenyl, SO-alkyl, alkyl-OSH, alkyl-OH, O-alkyl-OH, O-alkyl-SH, S-alkyl-OH, S-alkyl-SH, alkyl-S-alkyl, alkyl-O-alkyl, ONO2, NO2, N3, NH2, aminoalkyl, aminoacid, aminoacyl, ONH2, O-aminoalkyl, O-aminoacid, O-aminoacyl, heterocycloalkyl, heterocycloalkaryl, aminoalkylamino, polyalklylamino, substituted silyl, or group having Formula I; R9 is O, S, CH2, S═O, CHF, or CF2, and either R2, R3, R8 or R13 serve as points of attachment to the siNA molecule of the invention.

[0226] In another embodiment, a siNA molecule of the invention comprises at least one (e.g., about 1, 2, 3, 4, 5, 6, 7, 8, 9, 10, or more) substituted polyalkyl moieties, for example a compound having Formula VII: [chemical structure]
wherein each n is independently an integer from 1 to 12, each R1, R2 and R3 is independently H, OH, alkyl, substituted alkyl, alkaryl or aralkyl, F, Cl, Br, CN, CF3, OCF3, OCN, O-alkyl, S-alkyl, N-alkyl, O-alkenyl, S-alkenyl, N-alkenyl, SO-alkyl, alkyl-OSH, alkyl-OH, O-alkyl-OH, O-alkyl-SH, S-alkyl-OH, S-alkyl-SH, alkyl-S-alkyl, alkyl-O-alkyl, ONO2, NO2, N3, NH2, aminoalkyl, aminoacid, aminoacyl, ONH2, O-aminoalkyl, O-aminoacid, O-aminoacyl, heterocycloalkyl, heterocycloalkaryl, aminoalkylamino, polyalklylamino, substituted silyl, or a group having Formula I, and R1, R2 or R3 serves as points of attachment to the siNA molecule of the invention.

[0227] In another embodiment, the invention features a compound having Formula VII, wherein R1 and R2 are hydroxyl (OH) groups, n=1, and R3 comprises 0 and is the point of attachment to the 3′-end, the 5′-end, or both of the 3′ and 5′-ends of one or both strands of a double-stranded siNA molecule of the invention or to a single-stranded siNA molecule of the invention. This modification is referred to herein as “glyceryl.”

[0228] In another embodiment, a moiety having any of Formula V, VI or VII of the invention is at the 3′-end, the 5′-end, or both of the 3′ and 5′-ends of a siNA molecule of the invention. For example, a moiety having Formula V, VI or VII can be present at the 3′-end, the 5′-end, or both of the 3′ and 5′-ends of the antisense strand, the sense strand, or both antisense and sense strands of the siNA molecule. In addition, a moiety having Formula VII can be present at the 3′-end or the 5′-end of a hairpin siNA molecule as described herein.

[0229] In another embodiment, a siNA molecule of the invention comprises an abasic residue having Formula V or VI, wherein the abasic residue having Formula VI or VI is connected to the siNA construct in a 3′-3′, 3′-2′,2′-3′, or 5′-5′ configuration, such as at the 3′-end, the 5′-end, or both of the 3′ and 5′-ends of one or both siNA strands.

[0230] In one embodiment, a siNA molecule of the invention comprises one or more (e.g., about 1, 2, 3, 4, 5, 6, 7, 8, 9, 10, or more) locked nucleic acid (LNA) nucleotides, for example at the 5′-end, the 3′-end, both of the 5′ and 3′-ends, or any combination thereof, of the siNA molecule.

[0231] In another embodiment, a siNA molecule of the invention comprises one or more (e.g., about 1, 2, 3, 4, 5, 6, 7, 8, 9, 10, or more) acyclic nucleotides, for example at the 5′-end, the 3′-end, both of the 5′ and 3′-ends, or any combination thereof, of the siNA molecule.

[0232] In one embodiment, the invention features a chemically-modified short interfering nucleic acid (siNA) molecule of the invention, wherein the chemically-modified siNA comprises a sense region, where any (e.g., one or more or all) pyrimidine nucleotides present in the sense region are 2′-deoxy-2′-fluoro pyrimidine nucleotides (e.g., wherein all pyrimidine nucleotides are 2′-deoxy-2′-fluoro pyrimidine nucleotides or alternately a plurality of pyrimidine nucleotides are 2′-deoxy-2′-fluoro pyrimidine nucleotides), and where any (e.g., one or more or all) purine nucleotides present in the sense region are 2′-deoxy purine nucleotides (e.g., wherein all purine nucleotides are 2′-deoxy purine nucleotides or alternately a plurality of purine nucleotides are 2′-deoxy purine nucleotides).

[0233] In one embodiment, the invention features a chemically-modified short interfering nucleic acid (siNA) molecule of the invention, wherein the chemically-modified siNA comprises a sense region, where any (e.g., one or more or all) pyrimidine nucleotides present in the sense region are 2′-deoxy-2′-fluoro pyrimidine nucleotides (e.g., wherein all pyrimidine nucleotides are 2′-deoxy-2′-fluoro pyrimidine nucleotides or alternately a plurality of pyrimidine nucleotides are 2′-deoxy-2′-fluoro pyrimidine nucleotides), and where any (e.g., one or more or all) purine nucleotides present in the sense region are 2′-deoxy purine nucleotides (e.g., wherein all purine nucleotides are 2′-deoxy purine nucleotides or alternately a plurality of purine nucleotides are 2′-deoxy purine nucleotides), wherein any nucleotides comprising a 3′-terminal nucleotide overhang that are present in said sense region are 2′-deoxy nucleotides.

[0234] In one embodiment, the invention features a chemically-modified short interfering nucleic acid (siNA) molecule of the invention, wherein the chemically-modified siNA comprises an antisense region, where any (e.g., one or more or all) pyrimidine nucleotides present in the antisense region are 2′-deoxy-2′-fluoro pyrimidine nucleotides (e.g., wherein all pyrimidine nucleotides are 2′-deoxy-2′-fluoro pyrimidine nucleotides or alternately a plurality of pyrimidine nucleotides are 2′-deoxy-2′-fluoro pyrimidine nucleotides), and wherein any (e.g., one or more or all) purine nucleotides present in the antisense region are 2′-O-methyl purine nucleotides (e.g., wherein all purine nucleotides are 2′-O-methyl purine nucleotides or alternately a plurality of purine nucleotides are 2′-O-methyl purine nucleotides).

[0235] In one embodiment, the invention features a chemically-modified short interfering nucleic acid (siNA) molecule of the invention, wherein the chemically-modified siNA comprises an antisense region, where any (e.g., one or more or all) pyrimidine nucleotides present in the antisense region are 2′-deoxy-2′-fluoro pyrimidine nucleotides (e.g., wherein all pyrimidine nucleotides are 2′-deoxy-2′-fluoro pyrimidine nucleotides or alternately a plurality of pyrimidine nucleotides are 2′-deoxy-2′-fluoro pyrimidine nucleotides), and wherein any (e.g., one or more or all) purine nucleotides present in the antisense region are 2′-O-methyl purine nucleotides (e.g., wherein all purine nucleotides are 2′-O-methyl purine nucleotides or alternately a plurality of purine nucleotides are 2′-O-methyl purine nucleotides), wherein any nucleotides comprising a 3′-terminal nucleotide overhang that are present in said antisense region are 2′-deoxy nucleotides.

[0236] In one embodiment, the invention features a chemically-modified short interfering nucleic acid (siNA) molecule of the invention, wherein the chemically-modified siNA comprises an antisense region, where any (e.g., one or more or all) pyrimidine nucleotides present in the antisense region are 2′-deoxy-2′-fluoro pyrimidine nucleotides (e.g., wherein all pyrimidine nucleotides are 2′-deoxy-2′-fluoro pyrimidine nucleotides or alternately a plurality of pyrimidine nucleotides are 2′-deoxy-2′-fluoro pyrimidine nucleotides), and where any (e.g., one or more or all) purine nucleotides present in the antisense region are 2′-deoxy purine nucleotides (e.g., wherein all purine nucleotides are 2′-deoxy purine nucleotides or alternately a plurality of purine nucleotides are 2′-deoxy purine nucleotides).

[0237] In one embodiment, the invention features a chemically-modified short interfering nucleic acid (siNA) molecule of the invention capable of mediating RNA interference (RNAi) inside a cell or reconstituted in vitro system, wherein the chemically-modified siNA comprises a sense region, where one or more pyrimidine nucleotides present in the sense region are 2′-deoxy-2′-fluoro pyrimidine nucleotides (e.g., wherein all pyrimidine nucleotides are 2′-deoxy-2′-fluoro pyrimidine nucleotides or alternately a plurality of pyrimidine nucleotides are 2′-deoxy-2′-fluoro pyrimidine nucleotides), and where one or more purine nucleotides present in the sense region are 2′-deoxy purine nucleotides (e.g., wherein all purine nucleotides are 2′-deoxy purine nucleotides or alternately a plurality of purine nucleotides are 2′-deoxy purine nucleotides), and inverted deoxy abasic modifications that are optionally present at the 3′-end, the 5′-end, or both of the 3′ and 5′-ends of the sense region, the sense region optionally further comprising a 3′-terminal overhang having between about 1 and about 4 (e.g, about 1, 2, 3, or 4) 2′-deoxyribonucleotides; and wherein the chemically-modified short interfering nucleic acid molecule comprises an antisense region, where one or more pyrimidine nucleotides present in the antisense region are 2′-deoxy-2′-fluoro pyrimidine nucleotides (e.g., wherein all pyrimidine nucleotides are 2′-deoxy-2′-fluoro pyrimidine nucleotides or alternately a plurality of pyrimidine nucleotides are 2′-deoxy-2′-fluoro pyrimidine nucleotides), and wherein one or more purine nucleotides present in the antisense region are 2′-O-methyl purine nucleotides (e.g., wherein all purine nucleotides are 2′-O-methyl purine nucleotides or alternately a plurality of purine nucleotides are 2′-O-methyl purine nucleotides), and a terminal cap modification, such as any modification described herein, that is optionally present at the 3′-end, the 5′-end, or both of the 3′ and 5′-ends of the antisense sequence, the antisense region optionally further comprising a 3′-terminal nucleotide overhang having between about 1 and about 4 (e.g, about 1, 2, 3, or 4) 2′-deoxynucleotides, wherein the overhang nucleotides can further comprise one or more (e.g., 1, 2, 3, or 4) phosphorothioate internucleotide linkages.

[0238] In one embodiment, the invention features a chemically-modified short interfering nucleic acid (siNA) molecule of the invention capable of mediating RNA interference (RNAi) inside a cell or reconstituted in vitro system, wherein the siNA comprises a sense region, where one or more pyrimidine nucleotides present in the sense region are 2′-deoxy-2′-fluoro pyrimidine nucleotides (e.g., wherein all pyrimidine nucleotides are 2′-deoxy-2′-fluoro pyrimidine nucleotides or alternately a plurality of pyrimidine nucleotides are 2′-deoxy-2′-fluoro pyrimidine nucleotides), and where one or more purine nucleotides present in the sense region are purine ribonucleotides (e.g., wherein all purine nucleotides are purine ribonucleotides or alternately a plurality of purine nucleotides are purine ribonucleotides), and inverted deoxy abasic modifications that are optionally present at the 3′-end, the 5′-end, or both of the 3′ and 5′-ends of the sense region, the sense region optionally further comprising a 3′-terminal overhang having between about 1 and about 4 (e.g, about 1, 2, 3, or 4) 2′-deoxyribonucleotides; and wherein the siNA comprises an antisense region, where one or more pyrimidine nucleotides present in the antisense region are 2′-deoxy-2′-fluoro pyrimidine nucleotides (e.g., wherein all pyrimidine nucleotides are 2′-deoxy-2′-fluoro pyrimidine nucleotides or alternately a plurality of pyrimidine nucleotides are 2′-deoxy-2′-fluoro pyrimidine nucleotides), and wherein any purine nucleotides present in the antisense region are 2′-O-methyl purine nucleotides (e.g., wherein all purine nucleotides are 2′-O-methyl purine nucleotides or alternately a plurality of purine nucleotides are 2′-O-methyl purine nucleotides), and a terminal cap modification, such as any modification described herein, that is optionally present at the 3′-end, the 5′-end, or both of the 3′ and 5′-ends of the antisense sequence, the antisense region optionally further comprising a 3′-terminal nucleotide overhang having between about 1 and about 4 (e.g, about 1, 2, 3, or 4) 2′-deoxynucleotides, wherein the overhang nucleotides can further comprise one or more (e.g., 1, 2, 3, or 4) phosphorothioate internucleotide linkages.

[0239] In one embodiment, the invention features a chemically-modified short interfering nucleic acid (siNA) molecule of the invention capable of mediating RNA interference (RNAi) inside a cell or reconstituted in vitro system, wherein the chemically-modified siNA comprises a sense region, where one or more pyrimidine nucleotides present in the sense region are 2′-deoxy-2′-fluoro pyrimidine nucleotides (e.g., wherein all pyrimidine nucleotides are 2′-deoxy-2′-fluoro pyrimidine nucleotides or alternately a plurality of pyrimidine nucleotides are 2′-deoxy-2′-fluoro pyrimidine nucleotides), and for example where one or more purine nucleotides present in the sense region are selected from the group consisting of 2′-deoxy nucleotides, locked nucleic acid (LNA) nucleotides, 2′-methoxyethyl nucleotides, 4′-thionucleotides, and 2′-O-methyl nucleotides (e.g., wherein all purine nucleotides are selected from the group consisting of 2′-deoxy nucleotides, locked nucleic acid (LNA) nucleotides, 2′-methoxyethyl nucleotides, 4′-thionucleotides, and 2′-O-methyl nucleotides or alternately a plurality of purine nucleotides are selected from the group consisting of 2′-deoxy nucleotides, locked nucleic acid (LNA) nucleotides, 2′-methoxyethyl nucleotides, 4′-thionucleotides, and 2′-O-methyl nucleotides), and wherein inverted deoxy abasic modifications are optionally present at the 3′-end, the 5′-end, or both of the 3′ and 5′-ends of the sense region, the sense region optionally further comprising a 3′-terminal overhang having between about 1 and about 4 (e.g, about 1, 2, 3, or 4) 2′-deoxyribonucleotides; and wherein the chemically-modified short interfering nucleic acid molecule comprises an antisense region, where one or more pyrimidine nucleotides present in the antisense region are 2′-deoxy-2′-fluoro pyrimidine nucleotides (e.g., wherein all pyrimidine nucleotides are 2′-deoxy-2′-fluoro pyrimidine nucleotides or alternately a plurality of pyrimidine nucleotides are 2′-deoxy-2′-fluoro pyrimidine nucleotides), and wherein one or more purine nucleotides present in the antisense region are selected from the group consisting of 2′-deoxy nucleotides, locked nucleic acid (LNA) nucleotides, 2′-methoxyethyl nucleotides, 4′-thionucleotides, and 2′-O-methyl nucleotides (e.g., wherein all purine nucleotides are selected from the group consisting of 2′-deoxy nucleotides, locked nucleic acid (LNA) nucleotides, 2′-methoxyethyl nucleotides, 4′-thionucleotides, and 2′-O-methyl nucleotides or alternately a plurality of purine nucleotides are selected from the group consisting of 2′-deoxy nucleotides, locked nucleic acid (LNA) nucleotides, 2′-methoxyethyl nucleotides, 4′-thionucleotides, and 2′-O-methyl nucleotides), and a terminal cap modification, that is optionally present at the 3′-end, the 5′-end, or both of the 3′ and 5′-ends of the antisense sequence, the antisense region optionally further comprising a 3′-terminal nucleotide overhang having between about 1 and about 4 (e.g, about 1, 2, 3, or 4) 2′-deoxynucleotides, wherein the overhang nucleotides can further comprise one or more (e.g., 1, 2, 3, or 4) phosphorothioate internucleotide linkages.

[0240] In another embodiment, any modified nucleotides present in the siNA molecules of the invention, preferably in the antisense strand of the siNA molecules of the invention, comprise modified nucleotides having properties or characteristics similar to naturally occurring ribonucleotides. For example, the invention features siNA molecules including modified nucleotides having a Northern conformation (e.g., Northern pseudorotation cycle, see for example Saenger, Principles of Nucleic Acid Structure, Springer-Verlag ed., 1984). As such, chemically modified nucleotides present in the siNA molecules of the invention, preferably in the antisense strand of the siNA molecules of the invention, are preferably resistant to nuclease degradation while at the same time maintaining the capacity to mediate RNAi. Non-limiting examples of nucleotides having a northern configuration include locked nucleic acid (LNA) nucleotides (e.g., 2′-O,4′-C-methylene-(D-ribofuranosyl)nucleotides); 2′-methoxyethoxy (MOE) nucleotides; 2′-deoxy-2′-fluoro nucleotides, 2′-deoxy-2′-chloro nucleotides, 2′-azido nucleotides, and 2′-O-methyl nucleotides.

[0241] In one embodiment, the invention features a chemically-modified short interfering nucleic acid molecule (siNA) capable of mediating RNA interference (RNAi) inside a cell or reconstituted in vitro system, wherein the chemical modification comprises one or more conjugates covalently attached to the chemically-modified siNA molecule. In another embodiment, the conjugate is covalently attached to the chemically-modified siNA molecule via a biodegradable linker. In one embodiment, the conjugate molecule is attached at the 3′-end of either the sense strand, the antisense strand, or both strands of the chemically-modified siNA molecule. In another embodiment, the conjugate molecule is attached at the 5′-end of either the sense strand, the antisense strand, or both strands of the chemically-modified siNA molecule. In yet another embodiment, the conjugate molecule is attached both the 3′-end and 5′-end of either the sense strand, the antisense strand, or both strands of the chemically-modified siNA molecule, or any combination thereof. In one embodiment, a conjugate molecule of the invention comprises a molecule that facilitates delivery of a chemically-modified siNA molecule into a biological system such as a cell. In another embodiment, the conjugate molecule attached to the chemically-modified siNA molecule is a poly ethylene glycol, human serum albumin, or a ligand for a cellular receptor that can mediate cellular uptake. Examples of specific conjugate molecules contemplated by the instant invention that can be attached to chemically-modified siNA molecules are described in Vargeese et al., U.S. Ser. No. 60/311,865, incorporated by reference herein. The type of conjugates used and the extent of conjugation of siNA molecules of the invention can be evaluated for improved pharmacokinetic profiles, bioavailability, and/or stability of siNA consturcts while at the same time maintaining the ability of the siNA to mediate RNAi activity. As such, one skilled in the art can screen siNA constructs that are modified with various conjugates to determine whether the siNA conjugate complex possesses improved properties while maintaining the ability to mediate RNAi, for example in animal models as are generally known in the art.

[0242] In one embodiment, the invention features a short interfering nucleic acid (siNA) molecule of the invention, wherein the siNA further comprises a nucleotide, non-nucleotide, or mixed nucleotide/non-nucleotide linker that joins the sense region of the siNA to the antisense region of the siNA. In another embodiment, a nucleotide linker of the invention can be a linker of >2 nucleotides in length, for example 3, 4, 5, 6, 7, 8, 9, or 10 nucleotides in length. In yet another embodiment, the nucleotide linker can be a nucleic acid aptamer. By “aptamer” or “nucleic acid aptamer” as used herein is meant a nucleic acid molecule that binds specifically to a target molecule wherein the nucleic acid molecule has sequence that is comprises a sequence recognized by the target molecule in its natural setting. Alternately, an aptamer can be a nucleic acid molecule that binds to a target molecule where the target molecule does not naturally bind to a nucleic acid. The target molecule can be any molecule of interest. For example, the aptamer can be used to bind to a ligand-binding domain of a protein, thereby preventing interaction of the naturally occurring ligand with the protein. This is a non-limiting example and those in the art will recognize that other embodiments can be readily generated using techniques generally known in the art, see for example Gold et al., 1995, Annu. Rev. Biochem., 64, 763; Brody and Gold, 2000, J. Biotechnol., 74, 5; Sun, 2000, Curr. Opin. Mol. Ther., 2, 100; Kusser, 2000, J. Biotechnol., 74, 27; Hermann and Patel, 2000, Science, 287, 820; and Jayasena, 1999, Clinical Chemistry, 45, 1628.

[0243] In yet another embodiment, a non-nucleotide linker of the invention comprises abasic nucleotide, polyether, polyamine, polyamide, peptide, carbohydrate, lipid, polyhydrocarbon, or other polymeric compounds (e.g. polyethylene glycols such as those having between 2 and 100 ethylene glycol units). Specific examples include those described by Seela and Kaiser, Nucleic Acids Res. 1990, 18:6353 and Nucleic Acids Res. 1987, 15:3113; Cload and Schepartz, J. Am. Chem. Soc. 1991, 113:6324; Richardson and Schepartz, J. Am. Chem. Soc. 1991, 113:5109; Ma et al., Nucleic Acids Res. 1993, 21:2585 and Biochemistry 1993, 32:1751; Durand et al., Nucleic Acids Res. 1990, 18:6353; McCurdy et al., Nucleosides & Nucleotides 1991, 10:287; Jschke et al., Tetrahedron Lett. 1993, 34:301; Ono et al., Biochemistry 1991, 30:9914; Arnold et al., International Publication No. WO 89/02439; Usman et al., International Publication No. WO 95/06731; Dudycz et al., International Publication No. WO 95/11910 and Ferentz and Verdine, J. Am. Chem. Soc. 1991, 113:4000, all hereby incorporated by reference herein. A “non-nucleotide” further means any group or compound that can be incorporated into a nucleic acid chain in the place of one or more nucleotide units, including either sugar and/or phosphate substitutions, and allows the remaining bases to exhibit their enzymatic activity. The group or compound can be abasic in that it does not contain a commonly recognized nucleotide base, such as adenosine, guanine, cytosine, uracil or thymine, for example at the C1 position of the sugar.

[0244] In one embodiment, the invention features a short interfering nucleic acid (siNA) molecule capable of mediating RNA interference (RNAi) inside a cell or reconstituted in vitro system, wherein one or both strands of the siNA molecule that are assembled from two separate oligonucleotides do not comprise any ribonucleotides. All positions within the siNA can include chemically modified nucleotides and/or non-nucleotides such as nucleotides and or non-nucleotides having Formula 1, II, III, IV, V, VI, or VII or any combination thereof to the extent that the ability of the siNA molecule to support RNAi activity in a cell is maintained.

[0245] In one embodiment, a siNA molecule of the invention is a single stranded siNA molecule that mediates RNAi activity in a cell or reconstituted in vitro system, wherein the siNA molecule comprises a single stranded oligonucleotide having complementarity to a target nucleic acid sequence. In another embodiment, the single stranded siNA molecule of the invention comprises a 5′-terminal phosphate group. In another embodiment, the single stranded siNA molecule of the invention comprises a 5′-terminal phosphate group and a 3′-terminal phosphate group (e.g., a 2′,3′-cyclic phosphate). In another embodiment, the single stranded siNA molecule of the invention comprises between 19 and 29 nucleotides. In yet another embodiment, the single stranded siNA molecule of the invention comprises one or more chemically modified nucleotides or non-nucleotides described herein. For example, all the positions within the siNA molecule can include chemically-modified nucleotides such as nucleotides having any of Formulae I-VII, or any combination thereof to the extent that the ability of the siNA molecule to support RNAi activity in a cell is maintained.

[0246] In one embodiment, a siNA molecule of the invention is a single stranded siNA molecule that mediates RNAi activity in a cell or reconstituted in vitro system, wherein the siNA molecule comprises a single stranded oligonucleotide having complementarity to a target nucleic acid sequence, and wherein one or more pyrimidine nucleotides present in the siNA are 2′-deoxy-2′-fluoro pyrimidine nucleotides (e.g., wherein all pyrimidine nucleotides are 2′-deoxy-2′-fluoro pyrimidine nucleotides or alternately a plurality of pyrimidine nucleotides are 2′-deoxy-2′-fluoro pyrimidine nucleotides), and wherein any purine nucleotides present in the antisense region are 2′-O-methyl purine nucleotides (e.g., wherein all purine nucleotides are 2′-O-methyl purine nucleotides or alternately a plurality of purine nucleotides are 2′-O-methyl purine nucleotides), and a terminal cap modification, such as any modification described herein, that is optionally present at the 3′-end, the 5′-end, or both of the 3′ and 5′-ends of the antisense sequence, the siNA optionally further comprising between about 1 and about 4 (e.g, about 1, 2, 3, or 4) terminal 2′-deoxynucleotides at the 3′-end of the siNA molecule, wherein the terminal nucleotides can further comprise one or more (e.g., 1, 2, 3, or 4) phosphorothioate internucleotide linkages, and wherein the siNA optionally further comprises a terminal phosphate group, such as a 5′-terminal phosphate group.

[0247] In one embodiment, a siNA molecule of the invention is a single stranded siNA molecule that mediates RNAi activity in a cell or reconstituted in vitro system, wherein the siNA molecule comprises a single stranded oligonucleotide having complementarity to a target nucleic acid sequence, and wherein one or more pyrimidine nucleotides present in the siNA are 2′-deoxy-2′-fluoro pyrimidine nucleotides (e.g., wherein all pyrimidine nucleotides are 2′-deoxy-2′-fluoro pyrimidine nucleotides or alternately a plurality of pyrimidine nucleotides are 2′-deoxy-2′-fluoro pyrimidine nucleotides), and wherein any purine nucleotides present in the antisense region are 2′-deoxy purine nucleotides (e.g., wherein all purine nucleotides are 2′-deoxy purine nucleotides or alternately a plurality of purine nucleotides are 2′-deoxy purine nucleotides), and a terminal cap modification, such as any modification described herein, that is optionally present at the 3′-end, the 5′-end, or both of the 3′ and 5′-ends of the antisense sequence, the siNA optionally further comprising between about 1 and about 4 (e.g, about 1, 2, 3, or 4) terminal 2′-deoxynucleotides at the 3′-end of the siNA molecule, wherein the terminal nucleotides can further comprise one or more (e.g., 1, 2, 3, or 4) phosphorothioate internucleotide linkages, and wherein the siNA optionally further comprises a terminal phosphate group, such as a 5′-terminal phosphate group.

[0248] In one embodiment, a siNA molecule of the invention is a single stranded siNA molecule that mediates RNAi activity in a cell or reconstituted in vitro system, wherein the siNA molecule comprises a single stranded oligonucleotide having complementarity to a target nucleic acid sequence, and wherein one or more pyrimidine nucleotides present in the siNA are 2′-deoxy-2′-fluoro pyrimidine nucleotides (e.g., wherein all pyrimidine nucleotides are 2′-deoxy-2′-fluoro pyrimidine nucleotides or alternately a plurality of pyrimidine nucleotides are 2′-deoxy-2′-fluoro pyrimidine nucleotides), and wherein any purine nucleotides present in the antisense region are locked nucleic acid (LNA) nucleotides (e.g., wherein all purine nucleotides are LNA nucleotides or alternately a plurality of purine nucleotides are LNA nucleotides), and a terminal cap modification, such as any modification described herein, that is optionally present at the 3′-end, the 5′-end, or both of the 3′ and 5′-ends of the antisense sequence, the siNA optionally further comprising between about 1 and about 4 (e.g, about 1, 2, 3, or 4) terminal 2′-deoxynucleotides at the 3′-end of the siNA molecule, wherein the terminal nucleotides can further comprise one or more (e.g., 1, 2, 3, or 4) phosphorothioate internucleotide linkages, and wherein the siNA optionally further comprises a terminal phosphate group, such as a 5′-terminal phosphate group.

[0249] In one embodiment, a siNA molecule of the invention is a single stranded siNA molecule that mediates RNAi activity in a cell or reconstituted in vitro system, wherein the siNA molecule comprises a single stranded oligonucleotide having complementarity to a target nucleic acid sequence, and wherein one or more pyrimidine nucleotides present in the siNA are 2′-deoxy-2′-fluoro pyrimidine nucleotides (e.g., wherein all pyrimidine nucleotides are 2′-deoxy-2′-fluoro pyrimidine nucleotides or alternately a plurality of pyrimidine nucleotides are 2′-deoxy-2′-fluoro pyrimidine nucleotides), and wherein any purine nucleotides present in the antisense region are 2′-methoxyethyl purine nucleotides (e.g., wherein all purine nucleotides are 2′-methoxyethyl purine nucleotides or alternately a plurality of purine nucleotides are 2′-methoxyethyl purine nucleotides), and a terminal cap modification, such as any modification described herein, that is optionally present at the 3′-end, the 5′-end, or both of the 3′ and 5′-ends of the antisense sequence, the siNA optionally further comprising between about 1 and about 4 (e.g, about 1, 2, 3, or 4) terminal 2′-deoxynucleotides at the 3-end of the siNA molecule, wherein the terminal nucleotides can further comprise one or more (e.g., 1, 2, 3, or 4) phosphorothioate internucleotide linkages, and wherein the siNA optionally further comprises a terminal phosphate group, such as a 5′-terminal phosphate group.

[0250] In one embodiment, a siNA molecule of the invention is a single stranded siNA molecule that mediates RNAi activity in a cell or reconstituted in vitro system, wherein the siNA molecule comprises a single stranded oligonucleotide having complementarity to a target nucleic acid sequence, and wherein one or more pyrimidine nucleotides present in the siNA are 2′-deoxy-2′-fluoro pyrimidine nucleotides (e.g., wherein all pyrimidine nucleotides are 2′-deoxy-2′-fluoro pyrimidine nucleotides or alternately a plurality of pyrimidine nucleotides are 2′-deoxy-2′-fluoro pyrimidine nucleotides), and wherein any purine nucleotides present in the antisense region are purine ribonucleotides (e.g., wherein all purine nucleotides are purine ribonucleotides or alternately a plurality of purine nucleotides are purine ribonucleotides), and a terminal cap modification, such as any modification described herein, that is optionally present at the 3′-end, the 5′-end, or both of the 3′ and 5′-ends of the antisense sequence, the siNA optionally further comprising between about 1 and about 4 (e.g, about 1, 2, 3, or 4) terminal 2′-deoxynucleotides at the 3-end of the siNA molecule, wherein the terminal nucleotides can further comprise one or more (e.g., 1, 2, 3, or 4) phosphorothioate internucleotide linkages, and wherein the siNA optionally further comprises a terminal phosphate group, such as a 5′-terminal phosphate group.

[0251] In another embodiment, any modified nucleotides present in the single stranded siNA molecules of the invention comprise modified nucleotides having properties or characteristics similar to naturally occurring ribonucleotides. For example, the invention features siNA molecules including modified nucleotides having a Northern conformation (e.g., Northern pseudorotation cycle, see for example Saenger, Principles of Nucleic Acid Structure, Springer-Verlag ed., 1984). As such, chemically modified nucleotides present in the single stranded siNA molecules of the invention are preferably resistant to nuclease degradation while at the same time maintaining the capacity to mediate RNAi.

E. Preparation of Oligonucleotides

[0252] The present oligonucleotides can be prepared by methods available to those skilled in the art. For example, unmodified RNA can be prepared by transcription, e.g., in vitro, using methods and constructs available in the art. The sequence for the particular target, and its complementary sequence can be inserted into a selected vector, and transcribed to produce the desired oligonucleotides by conventional methods.

[0253] In many cases, it will be desirable to chemically synthesize the oligonucleotides, e.g., for chemically modified oligonucleotides. Such syntheses are known in the art, and are described, for example, below.

[0254] Thus, siNA molecules can be designed to interact with various sites in the RNA message, for example target sequences within the RNA sequences described herein. The sequence of one strand of the siNA molecule(s) is complementary to the target site sequences described above. The siNA molecules can be chemically synthesized using methods described herein. Inactive siNA molecules that are used as control sequences can be synthesized by scrambling the sequence of the siNA molecules such that it is not complementary to the target sequence. Generally, siNA constructs can by synthesized using solid phase oligonucleotide synthesis methods as described herein (see for example Usman et al., U.S. Pat. Nos. 5,804,683; 5,831,071; 5,998,203; 6,117,657; 6,353,098; 6,362,323; 6,437,117; 6,469,158; Scaringe et al., U.S. Pat. Nos. 6,111,086; 6,008,400; 6,111,086). Modification of synthesis conditions can be used to optimize coupling efficiency, for example by using differing coupling times, differing reagent/phosphoramidite concentrations, differing contact times, differing solid supports and solid support linker chemistries depending on the particular chemical composition of the siNA to be synthesized. Deprotection and purification of the siNA can be performed as is generally described in Vargeese et al., U.S. Ser. No. 10/194,875, incorporated by reference herein in its entirety. Additionally, deprotection conditions can be modified to provide the best possible yield and purity of siNA constructs. For example, applicant has observed that oligonucleotides comprising 2′-deoxy-2′-fluoro nucleotides can degrade under inappropriate deprotection conditions. Such oligonucleotides are deprotected using aqueous methylamine at about 35° C. for 30 minutes. If the 2′-deoxy-2′-fluoro containing oligonucleotide also comprises ribonucleotides, after deprotection with aqueous methylamine at about 35° C. for 30 minutes, TEA-HF is added and the reaction maintained at about 65° C. for an additional 15 minutes.

[0255] Synthesis of Nucleic Acid Molecules

[0256] In greater detail, synthesis of nucleic acids greater than 100 nucleotides in length is difficult using automated methods, and the therapeutic cost of such molecules is prohibitive. In this invention, small nucleic acid motifs, “small” refers to nucleic acid motifs no more than 100 nucleotides in length, preferably no more than 80 nucleotides in length, and most preferably no more than 50 nucleotides in length; e.g., individual siNA oligonucleotide sequences or siNA sequences synthesized in tandem) are preferably used for exogenous delivery. The simple structure of these molecules increases the ability of the nucleic acid to invade targeted regions of protein and/or RNA structure. Exemplary molecules of the instant invention are chemically synthesized, and others can similarly be synthesized.

[0257] Oligonucleotides (e.g., certain modified oligonucleotides or portions of oligonucleotides lacking ribonucleotides) are synthesized using protocols known in the art, for example as described in Caruthers et al., 1992, Methods in Enzymology 211, 3-19, Thompson et al., International PCT Publication No. WO 99/54459, Wincott et al., 1995, Nucleic Acids Res. 23, 2677-2684, Wincott et al., 1997, Methods Mol. Bio., 74, 59, Brennan et al., 1998, Biotechnol Bioeng., 61, 33-45, and Brennan, U.S. Pat. No. 6,001,311. All of these references are incorporated herein by reference. The synthesis of oligonucleotides makes use of common nucleic acid protecting and coupling groups, such as dimethoxytrityl at the 5′-end, and phosphoramidites at the 3′-end. In a non-limiting example, small scale syntheses are conducted on a 394 Applied Biosystems, Inc. synthesizer using a 0.2 μmol scale protocol with a 2.5 min coupling step for 2′-O-methylated nucleotides and a 45 sec coupling step for 2′-deoxy nucleotides or 2′-deoxy-2′-fluoro nucleotides. Alternatively, syntheses at the 0.2 μmol scale can be performed on a 96-well plate synthesizer, such as the instrument produced by Protogene (Palo Alto, Calif.) with minimal modification to the cycle. A 33-fold excess (60 μL of 0.11 M=6.6 μmol) of 2′-O-methyl phosphoramidite and a 105-fold excess of S-ethyl tetrazole (60 μL of 0.25 M=15 μmol) can be used in each coupling cycle of 2′-O-methyl residues relative to polymer-bound 5′-hydroxyl. A 22-fold excess (40 μL of 0.11 M=4.4 μmol) of deoxy phosphoramidite and a 70-fold excess of S-ethyl tetrazole (40 μL of 0.25 M=10 μmol) can be used in each coupling cycle of deoxy residues relative to polymer-bound 5′-hydroxyl. Average coupling yields on the 394 Applied Biosystems, Inc. synthesizer, determined by colorimetric quantitation of the trityl fractions, are typically 97.5-99%. Other oligonucleotide synthesis reagents for the 394 Applied Biosystems, Inc. synthesizer include the following: detritylation solution is 3% TCA in methylene chloride (ABI); capping is performed with 16% N-methyl imidazole in THF (ABI) and 10% acetic anhydride/10% 2,6-lutidine in THF (ABI); and oxidation solution is 16.9 mM I₂, 49 mM pyridine, 9% water in THF (PERSEPTIVE™). Burdick & Jackson Synthesis Grade acetonitrile is used directly from the reagent bottle. S-Ethyltetrazole solution (0.25 M in acetonitrile) is made up from the solid obtained from American International Chemical, Inc. Alternately, for the introduction of phosphorothioate linkages, Beaucage reagent (3H-1,2-Benzodithiol-3-one 1,1-dioxide, 0.05 M in acetonitrile) is used.

[0258] Deprotection of the DNA-based oligonucleotides is performed as follows: the polymer-bound trityl-on oligoribonucleotide is transferred to a 4 mL glass screw top vial and suspended in a solution of 40% aq. methylamine (1 mL) at 65° C. for 10 min. After cooling to −20° C., the supernatant is removed from the polymer support. The support is washed three times with 1.0 mL of EtOH:MeCN:H2O/3:1:1, vortexed and the supernatant is then added to the first supernatant. The combined supernatants, containing the oligoribonucleotide, are dried to a white powder.

[0259] The method of synthesis used for RNA including certain siNA molecules of the invention follows the procedure as described in Usman et al., 1987, J. Am. Chem. Soc., 109, 7845; Scaringe et al., 1990, Nucleic Acids Res., 18, 5433; and Wincott et al., 1995, Nucleic Acids Res. 23, 2677-2684 Wincott et al., 1997, Methods Mol. Bio., 74, 59, and makes use of common nucleic acid protecting and coupling groups, such as dimethoxytrityl at the 5′-end, and phosphoramidites at the 3′-end. In a non-limiting example, small scale syntheses are conducted on a 394 Applied Biosystems, Inc. synthesizer using a 0.2 μmol scale protocol with a 7.5 min coupling step for alkylsilyl protected nucleotides and a 2.5 min coupling step for 2′-O-methylated nucleotides. Alternatively, syntheses at the 0.2 μmol scale can be done on a 96-well plate synthesizer, such as the instrument produced by Protogene (Palo Alto, Calif.) with minimal modification to the cycle. A 33-fold excess (60 μL of 0.11 M=6.6 μmol) of 2′-O-methyl phosphoramidite and a 75-fold excess of S-ethyl tetrazole (60 μL of 0.25 M=15 μmol) can be used in each coupling cycle of 2′-O-methyl residues relative to polymer-bound 5′-hydroxyl. A 66-fold excess (120 μL of 0.11 M=13.2 μmol) of alkylsilyl (ribo) protected phosphoramidite and a 150-fold excess of S-ethyl tetrazole (120 μL of 0.25 M=30 μmol) can be used in each coupling cycle of ribo residues relative to polymer-bound 5′-hydroxyl. Average coupling yields on the 394 Applied Biosystems, Inc. synthesizer, determined by colorimetric quantitation of the trityl fractions, are typically 97.5-99%. Other oligonucleotide synthesis reagents for the 394 Applied Biosystems, Inc. synthesizer include the following: detritylation solution is 3% TCA in methylene chloride (ABI); capping is performed with 16% N-methyl imidazole in THF (ABI) and 10% acetic anhydride/10% 2,6-lutidine in THF (ABI); oxidation solution is 16.9 mM 12, 49 mM pyridine, 9% water in THF (PERSEPTIVE™). Burdick & Jackson Synthesis Grade acetonitrile is used directly from the reagent bottle. S-Ethyltetrazole solution (0.25 M in acetonitrile) is made up from the solid obtained from American International Chemical, Inc. Alternately, for the introduction of phosphorothioate linkages, Beaucage reagent (3H-1,2-Benzodithiol-3-one 1,1-dioxide0.05 M in acetonitrile) is used.

[0260] Deprotection of the RNA is performed using either a two-pot or one-pot protocol. For the two-pot protocol, the polymer-bound trityl-on oligoribonucleotide is transferred to a 4 mL glass screw top vial and suspended in a solution of 40% aq. methylamine (1 mL) at 65° C. for 10 min. After cooling to −20° C., the supernatant is removed from the polymer support. The support is washed three times with 1.0 mL of EtOH:MeCN:H2O/3:1:1, vortexed and the supernatant is then added to the first supernatant. The combined supernatants, containing the oligoribonucleotide, are dried to a white powder. The base deprotected oligoribonucleotide is resuspended in anhydrous TEA/HF/NMP solution (300 μL of a solution of 1.5 mL N-methylpyrrolidinone, 750 μL TEA and 1 mL TEA•3HF to provide a 1.4 M HF concentration) and heated to 65° C. After 1.5 h, the oligomer is quenched with 1.5 M NH4HCO3.

[0261] Alternatively, for the one-pot protocol, the polymer-bound trityl-on oligoribonucleotide is transferred to a 4 mL glass screw top vial and suspended in a solution of 33% ethanolic methylamine/DMSO: 1/1 (0.8 mL) at 65° C. for 15 min. The vial is brought to room temperature. TEA•3HF (0.1 mL) is added and the vial is heated at 65° C. for 15 min. The sample is cooled at −20° C. and then quenched with 1.5 M NH4HCO3.

[0262] For purification of the trityl-on oligomers, the quenched NH₄HCO₃ solution is loaded onto a C-18 containing cartridge that had been prewashed with acetonitrile followed by 50 mM TEAA. After washing the loaded cartridge with water, the RNA is detritylated with 0.5% TFA for 13 min. The cartridge is then washed again with water, salt exchanged with 1 M NaCl and washed with water again. The oligonucleotide is then eluted with 30% acetonitrile.

[0263] The average stepwise coupling yields are typically >98% (Wincott et al., 1995 Nucleic Acids Res. 23, 2677-2684). Those of ordinary skill in the art will recognize that the scale of synthesis can be adapted to be larger or smaller than the example described above including but not limited to 96-well format.

[0264] Alternatively, the nucleic acid molecules of the present invention can be synthesized separately and joined together post-synthetically, for example, by ligation (Moore et al., 1992, Science 256, 9923; Draper et al., International PCT publication No. WO 93/23569; Shabarova et al., 1991, Nucleic Acids Research 19, 4247; Bellon et al., 1997, Nucleosides & Nucleotides, 16, 951; Bellon et al., 1997, Bioconjugate Chem. 8, 204), or by hybridization following synthesis and/or deprotection.

[0265] The siNA molecules of the invention can also be synthesized via a tandem synthesis methodology as described below, where both siNA strands are synthesized as a single contiguous oligonucleotide fragment or strand separated by a cleavable linker which is subsequently cleaved to provide separate siNA fragments or strands that hybridize and permit purification of the siNA duplex. The linker can be a oligonucleotide linker or a non-nucleotide linker. The tandem synthesis of siNA as described herein can be readily adapted to both multiwell/multiplate synthesis platforms such as 96 well or similarly larger multi-well platforms. The tandem synthesis of siNA as described herein can also be readily adapted to large scale synthesis platforms employing batch reactors, synthesis columns and the like.

[0266] A siNA molecule can also be assembled from two distinct nucleic acid strands or fragments wherein one fragment includes the sense region and the second fragment includes the antisense region of the RNA molecule.

[0267] The nucleic acid molecules of the present invention can be modified extensively to enhance stability by modification with nuclease resistant groups, for example, 2′-amino, 2′-C-allyl, 2′-fluoro, 2′-O-methyl, 2′-H (for a review see Usman and Cedergren, 1992, TIBS 17, 34; Usman et al., 1994, Nucleic Acids Symp. Ser. 31, 163). siNA constructs can be purified by gel electrophoresis using general methods or can be purified by high pressure liquid chromatography (HPLC; see Wincott et al., supra, the totality of which is hereby incorporated herein by reference) and re-suspended in water.

[0268] In another aspect of the invention, siNA molecules of the invention are expressed from transcription units inserted into DNA or RNA vectors. The recombinant vectors can be DNA plasmids or viral vectors. siNA expressing viral vectors can be constructed based on, but not limited to, adeno-associated virus, retrovirus, adenovirus, or alphavirus. The recombinant vectors capable of expressing the siNA molecules can be delivered as described herein, and persist in target cells. Alternatively, viral vectors can be used that provide for transient expression of siNA molecules.

[0269] Tandem Synthesis of siNA Constructs

[0270] Exemplary siNA molecules are synthesized in tandem using a cleavable linker, for example a succinyl-based linker. Tandem synthesis as described herein is followed by a one-step purification process that provides RNAi molecules in high yield. This approach is highly amenable to siNA synthesis in support of high throughput RNAi screening, and can be readily adapted to multi-column or multi-well synthesis platforms.

[0271] After completing a tandem synthesis of an siNA oligo and its complement in which the 5′-terminal dimethoxytrityl (5′-O-DMT) group remains intact (trityl on synthesis), the oligonucleotides are deprotected as described above. Following deprotection, the siNA sequence strands are allowed to spontaneously hybridize. This hybridization yields a duplex in which one strand has retained the 5′-O-DMT group while the complementary strand comprises a terminal 5′-hydroxyl. The newly formed duplex behaves as a single molecule during routine solid-phase extraction purification (Trityl-On purification) even though only one molecule has a dimethoxytrityl group. Because the strands form a stable duplex, this dimethoxytrityl group (or an equivalent group, such as other trityl groups or other hydrophobic moieties) is all that is required to purify the pair of oligos, for example by using a C18 cartridge.

[0272] Standard phosphoramidite synthesis chemistry is used up to point of introducing a tandem linker, such as an inverted deoxy abasic succinate or glyceryl succinate linker or an equivalent cleavable linker. A non-limiting example of linker coupling conditions that can be used includes a hindered base such as diisopropylethylamine (DIPA) and/or DMAP in the presence of an activator reagent such as Bromotripyrrolidinophosphoniumhexaflurorophosphate (PyBrOP). After the linker is coupled, standard synthesis chemistry is utilized to complete synthesis of the second sequence leaving the terminal the 5′-O-DMT intact. Following synthesis, the resulting oligonucleotide is deprotected according to the procedures described herein and quenched with a suitable buffer, for example with 50 mM NaOAc or 1.5M NH₄H₂CO₃.

[0273] Purification of the siNA duplex can be readily accomplished using solid phase extraction, for example using a Waters C18 SepPak 1 g cartridge conditioned with 1 column volume (CV) of acetonitrile, 2 CV H2O, and 2 CV 50 mM NaOAc. The sample is loaded and then washed with 1 CV H2O or 50 mM NaOAc. Failure sequences are eluted with 1 CV 14% ACN (Aqueous with 50 mM NaOAc and 50 mM NaCl). The column is then washed, for example with 1 CV H2O followed by on-column detritylation, for example by passing 1 CV of 1% aqueous trifluoroacetic acid (TFA) over the column, then adding a second CV of 1% aqueous TFA to the column and allowing to stand for approx. 10 minutes. The remaining TFA solution is removed and the column washed with H20 followed by 1 CV 1 M NaCl and additional H2O. The siNA duplex product is then eluted, for example using 1 CV 20% aqueous CAN.

[0274] Optimizing Activity of the Nucleic Acid Molecules

[0275] Chemically synthesizing nucleic acid molecules with modifications (base, sugar and/or phosphate) can prevent their degradation by serum ribonucleases, which can increase their potency (see e.g., Eckstein et al., International Publication No. WO 92/07065; Perrault et al., 1990 Nature 344, 565; Pieken et al., 1991, Science 253, 314; Usman and Cedergren, 1992, Trends in Biochem. Sci. 17, 334; Usman et al., International Publication No. WO 93/15187; and Rossi et al., International Publication No. WO 91/03162; Sproat, U.S. Pat. No. 5,334,711; Gold et al., U.S. Pat. No. 6,300,074; and Burgin et al., supra; all of which are incorporated by reference herein). All of the above references describe various chemical modifications that can be made to the base, phosphate and/or sugar moieties of the nucleic acid molecules described herein. Modifications that enhance their efficacy in cells, and removal of bases from nucleic acid molecules to shorten oligonucleotide synthesis times and reduce chemical requirements are desired.

[0276] There are several examples in the art describing sugar, base and phosphate modifications that can be introduced into nucleic acid molecules with significant enhancement in their nuclease stability and efficacy. For example, oligonucleotides are modified to enhance stability and/or enhance biological activity by modification with nuclease resistant groups, for example, 2′-amino, 2′-C-allyl, 2′-fluoro, 2′-O-methyl, 2′-O-allyl, 2′-H, nucleotide base modifications (for a review see Usman and Cedergren, 1992, TIBS. 17, 34; Usman et al., 1994, Nucleic Acids Symp. Ser. 31, 163; Burgin et al., 1996, Biochemistry, 35, 14090). Sugar modification of nucleic acid molecules have been extensively described in the art (see Eckstein et al., International Publication PCT No. WO 92/07065; Perrault et al. Nature, 1990, 344, 565-568; Pieken et al. Science, 1991, 253, 314-317; Usman and Cedergren, Trends in Biochem. Sci., 1992, 17, 334-339; Usman et al. International Publication PCT No. WO 93/15187; Sproat, U.S. Pat. No. 5,334,711 and Beigelman et al., 1995, J. Biol. Chem., 270, 25702; Beigelman et al., International PCT publication No. WO 97/26270; Beigelman et al., U.S. Pat. No. 5,716,824; Usman et al., U.S. Pat. No. 5,627,053; Woolf et al., International PCT Publication No. WO 98/13526; Thompson et al., U.S. Ser. No. 60/082,404 which was filed on Apr. 20, 1998; Karpeisky et al., 1998, Tetrahedron Lett., 39, 1131; Earnshaw and Gait, 1998, Biopolymers (Nucleic Acid Sciences), 48, 39-55; Verma and Eckstein, 1998, Annu. Rev. Biochem., 67, 99-134; and Burlina et al., 1997, Bioorg. Med. Chem., 5, 1999-2010; all of the references are hereby incorporated in their totality by reference herein). Such publications describe general methods and strategies to determine the location of incorporation of sugar, base and/or phosphate modifications and the like into nucleic acid molecules without modulating catalysis, and are incorporated by reference herein. In view of such teachings, similar modifications can be used as described herein to modify the siNA nucleic acid molecules of the instant invention so long as the ability of siNA to promote RNAi is cells is not significantly inhibited.

[0277] While chemical modification of oligonucleotide internucleotide linkages with phosphorothioate, phosphorodithioate, and/or 5′-methylphosphonate linkages improves stability, excessive modifications can cause some toxicity or decreased activity. Therefore, when designing nucleic acid molecules, the amount of these internucleotide linkages should be minimized. The reduction in the concentration of these linkages should lower toxicity, resulting in increased efficacy and higher specificity of these molecules.

[0278] Short interfering nucleic acid (siNA) molecules having chemical modifications that maintain or enhance activity are provided. Such a nucleic acid is also generally more resistant to nucleases than an unmodified nucleic acid. Accordingly, the in vitro and/or in vivo activity should not be significantly lowered. In cases in which modulation is the goal, therapeutic nucleic acid molecules delivered exogenously should optimally be stable within cells until translation of the target RNA has been modulated long enough to reduce the levels of the undesirable protein. This period of time varies between hours to days depending upon the disease state. Improvements in the chemical synthesis of RNA and DNA (Wincott et al., 1995, Nucleic Acids Res. 23, 2677; Caruthers et al., 1992, Methods in Enzymology 211,3-19 (incorporated by reference herein)) have expanded the ability to modify nucleic acid molecules by introducing nucleotide modifications to enhance their nuclease stability, as described above.

[0279] In one embodiment, nucleic acid molecules of the invention include one or more (e.g., about 1, 2, 3, 4, 5, 6, 7, 8, 9, 10, or more) G-clamp nucleotides. A G-clamp nucleotide is a modified cytosine analog wherein the modifications confer the ability to hydrogen bond both Watson-Crick and Hoogsteen faces of a complementary guanine within a duplex, see for example Lin and Matteucci, 1998, J. Am. Chem. Soc., 120, 8531-8532. A single G-clamp analog substitution within an oligonucleotide can result in substantially enhanced helical thermal stability and mismatch discrimination when hybridized to complementary oligonucleotides. The inclusion of such nucleotides in nucleic acid molecules of the invention results in both enhanced affinity and specificity to nucleic acid targets, complementary sequences, or template strands. In another embodiment, nucleic acid molecules of the invention include one or more (e.g., about 1, 2, 3, 4, 5, 6, 7, 8, 9, 10, or more) LNA “locked nucleic acid” nucleotides such as a 2′,4′-C mythylene bicyclonucleotide (see for example Wengel et al., International PCT Publication No. WO 00/66604 and WO 99/14226).

[0280] In another embodiment, the invention features conjugates and/or complexes of siNA molecules of the invention. Such conjugates and/or complexes can be used to facilitate delivery of siNA molecules into a biological system, such as a cell. The conjugates and complexes provided by the instant invention can impart therapeutic activity by transferring therapeutic compounds across cellular membranes, altering the pharmacokinetics, and/or modulating the localization of nucleic acid molecules of the invention. The present invention encompasses the design and synthesis of novel conjugates and complexes for the delivery of molecules, including, but not limited to, small molecules, lipids, phospholipids, nucleosides, nucleotides, nucleic acids, antibodies, toxins, negatively charged polymers and other polymers, for example proteins, peptides, hormones, carbohydrates, polyethylene glycols, or polyamines, across cellular membranes. In general, the transporters described are designed to be used either individually or as part of a multi-component system, with or without degradable linkers. These compounds are expected to improve delivery and/or localization of nucleic acid molecules of the invention into a number of cell types originating from different tissues, in the presence or absence of serum (see Sullenger and Cech, U.S. Pat. No. 5,854,038). Conjugates of the molecules described herein can be attached to biologically active molecules via linkers that are biodegradable, such as biodegradable nucleic acid linker molecules.

[0281] The term “biodegradable linker” as used herein, refers to a nucleic acid or non-nucleic acid linker molecule that is designed as a biodegradable linker to connect one molecule to another molecule, for example, a biologically active molecule to a siNA molecule of the invention or the sense and antisense strands of a siNA molecule of the invention. The biodegradable linker is designed such that its stability can be modulated for a particular purpose, such as delivery to a particular tissue or cell type. The stability of a nucleic acid-based biodegradable linker molecule can be modulated by using various chemistries, for example combinations of ribonucleotides, deoxyribonucleotides, and chemically-modified nucleotides, such as 2′-O-methyl, 2′-fluoro, 2′-amino, 2′-O-amino, 2′-C-allyl, 2′-O-allyl, and other 2′-modified or base modified nucleotides. The biodegradable nucleic acid linker molecule can be a dimer, trimer, tetramer or longer nucleic acid molecule, for example, an oligonucleotide of about 2, 3, 4, 5, 6, 7, 8, 9, 10, 11, 12, 13, 14, 15, 16, 17, 18, 19, or 20 nucleotides in length, or can comprise a single nucleotide with a phosphorus-based linkage, for example, a phosphoramidate or phosphodiester linkage. The biodegradable nucleic acid linker molecule can also comprise nucleic acid backbone, nucleic acid sugar, or nucleic acid base modifications.

[0282] The term “biodegradable” as used herein, refers to degradation in a biological system, for example enzymatic degradation or chemical degradation.

[0283] The term “biologically active molecule” as used herein, refers to compounds or molecules that are capable of eliciting or modifying a biological response in a system. Non-limiting examples of biologically active siNA molecules either alone or in combination with othe molecules contemplated by the instant invention include therapeutically active molecules such as antibodies, hormones, antivirals, peptides, proteins, chemotherapeutics, small molecules, vitamins, co-factors, nucleosides, nucleotides, oligonucleotides, enzymatic nucleic acids, antisense nucleic acids, triplex forming oligonucleotides, 2,5-A chimeras, siNA, dsRNA, allozymes, aptamers, decoys and analogs thereof. Biologically active molecules of the invention also include molecules capable of modulating the pharmacokinetics and/or pharmacodynamics of other biologically active molecules, for example, lipids and polymers such as polyamines, polyamides, polyethylene glycol and other polyethers.

[0284] The term “phospholipid” as used herein, refers to a hydrophobic molecule comprising at least one phosphorus group. For example, a phospholipid can comprise a phosphorus-containing group and saturated or unsaturated alkyl group, optionally substituted with OH, COOH, oxo, amine, or substituted or unsubstituted aryl groups.

[0285] Therapeutic nucleic acid molecules (e.g., siNA molecules) delivered exogenously optimally are stable within cells until reverse trascription of the RNA has been modulated long enough to reduce the levels of the RNA transcript. The nucleic acid molecules are resistant to nucleases in order to function as effective intracellular therapeutic agents. Improvements in the chemical synthesis of nucleic acid molecules described in the instant invention and in the art have expanded the ability to modify nucleic acid molecules by introducing nucleotide modifications to enhance their nuclease stability as described above. n yet another embodiment, siNA molecules having chemical modifications that maintain or enhance enzymatic activity of proteins involved in RNAi are provided. Such nucleic acids are also generally more resistant to nucleases than unmodified nucleic acids. Thus, in vitro and/or in vivo the activity should not be significantly lowered.

[0286] Use of the nucleic acid-based molecules of the invention will lead to better treatment of the disease progression by affording the possibility of combination therapies (e.g., multiple siNA molecules targeted to different genes; nucleic acid molecules coupled with known small molecule modulators; or intermittent treatment with combinations of molecules, including different motifs and/or other chemical or biological molecules). The treatment of subjects with siNA molecules can also include combinations of different types of nucleic acid molecules, such as enzymatic nucleic acid molecules (ribozymes), allozymes, antisense, 2,5-A oligoadenylate, decoys, and aptamers.

[0287] In another aspect a siNA molecule of the invention comprises one or more 5′ and/or a 3′-cap structure, for example on only the sense siNA strand, the antisense siNA strand, or both siNA strands.

[0288] By “cap structure” is meant chemical modifications, which have been incorporated at either terminus of the oligonucleotide (see, for example, Adamic et al., U.S. Pat. No. 5,998,203, incorporated by reference herein). These terminal modifications protect the nucleic acid molecule from exonuclease degradation, and may help in delivery and/or localization within a cell. The cap may be present at the 5′-terminus (5′-cap) or at the 3′-terminal (3′-cap) or may be present on both termini. In non-limiting examples: the 5′-cap is selected from the group comprising glyceryl, inverted deoxy abasic residue (moiety); 4′,5′-methylene nucleotide; 1-(beta-D-erythrofuranosyl)nucleotide, 4′-thio nucleotide; carbocyclic nucleotide; 1,5-anhydrohexitol nucleotide; L-nucleotides; alpha-nucleotides; modified base nucleotide; phosphorodithioate linkage; threo-pentofuranosyl nucleotide; acyclic 3′,4′-seco nucleotide; acyclic 3,4-dihydroxybutyl nucleotide; acyclic 3,5-dihydroxypentyl nucleotide, 3′-3′-inverted nucleotide moiety; 3′-3′-inverted abasic moiety; 3′-2′-inverted nucleotide moiety; 3′-2′-inverted abasic moiety; 1,4-butanediol phosphate; 3′-phosphoramidate; hexylphosphate; aminohexyl phosphate; 3′-phosphate; 3′-phosphorothioate; phosphorodithioate; or bridging or non-bridging methylphosphonate moiety.

[0289] In yet another embodiment, the 3′-cap is selected from a group comprising glyceryl, inverted deoxy abasic residue (moiety), 4′,5′-methylene nucleotide; 1-(beta-D-erythrofuranosyl)nucleotide; 4′-thio nucleotide, carbocyclic nucleotide; 5′-amino-alkyl phosphate; 1,3-diamino-2-propyl phosphate; 3-aminopropyl phosphate; 6-aminohexyl phosphate; 1,2-aminododecyl phosphate; hydroxypropyl phosphate; 1,5-anhydrohexitol nucleotide; L-nucleotide; alpha-nucleotide; modified base nucleotide; phosphorodithioate; threo-pentofuranosyl nucleotide; acyclic 3′,4′-seco nucleotide; 3,4-dihydroxybutyl nucleotide; 3,5-dihydroxypentyl nucleotide, 5′-5′-inverted nucleotide moiety; 5′-5′-inverted abasic moiety; 5′-phosphoramidate; 5′-phosphorothioate; 1,4-butanediol phosphate; 5′-amino; bridging and/or non-bridging 5′-phosphoramidate, phosphorothioate and/or phosphorodithioate, bridging or non bridging methylphosphonate and 5′-mercapto moieties (for more details see Beaucage and Iyer, 1993, Tetrahedron 49, 1925; incorporated by reference herein).

[0290] By the term “non-nucleotide” is meant any group or compound which can be incorporated into a nucleic acid chain in the place of one or more nucleotide units, including either sugar and/or phosphate substitutions, and allows the remaining bases to exhibit their enzymatic activity. The group or compound is abasic in that it does not contain a commonly recognized nucleotide base, such as adenosine, guanine, cytosine, uracil or thymine and therefore lacks a base at the 1′-position.

[0291] An “alkyl” group refers to a saturated aliphatic hydrocarbon, including straight-chain, branched-chain, and cyclic alkyl groups. Preferably, the alkyl group has 1 to 12 carbons. More preferably, it is a lower alkyl of from 1 to 7 carbons, more preferably 1 to 4 carbons. The alkyl group can be substituted or unsubstituted. When substituted the substituted group(s) is preferably, hydroxyl, cyano, alkoxy, ═O, ═S, NO₂ or N(CH₃)₂, amino, or SH. The term also includes alkenyl groups that are unsaturated hydrocarbon groups containing at least one carbon-carbon double bond, including straight-chain, branched-chain, and cyclic groups. Preferably, the alkenyl group has 1 to 12 carbons. More preferably, it is a lower alkenyl of from 1 to 7 carbons, more preferably 1 to 4 carbons. The alkenyl group may be substituted or unsubstituted. When substituted the substituted group(s) is preferably, hydroxyl, cyano, alkoxy, ═O, ═S, NO₂, halogen, N(CH₃)₂, amino, or SH. The term “alkyl” also includes alkynyl groups that have an unsaturated hydrocarbon group containing at least one carbon-carbon triple bond, including straight-chain, branched-chain, and cyclic groups. Preferably, the alkynyl group has 1 to 12 carbons. More preferably, it is a lower alkynyl of from 1 to 7 carbons, more preferably 1 to 4 carbons. The alkynyl group may be substituted or unsubstituted. When substituted the substituted group(s) is preferably, hydroxyl, cyano, alkoxy, ═O, ═S, NO₂ or N(CH₃)₂, amino or SH.

[0292] Such alkyl groups can also include aryl, alkylaryl, carbocyclic aryl, heterocyclic aryl, amide and ester groups. An “aryl” group refers to an aromatic group that has at least one ring having a conjugated pi electron system and includes carbocyclic aryl, heterocyclic aryl and biaryl groups, all of which may be optionally substituted. The preferred substituent(s) of aryl groups are halogen, trihalomethyl, hydroxyl, SH, OH, cyano, alkoxy, alkyl, alkenyl, alkynyl, and amino groups. An “alkylaryl” group refers to an alkyl group (as described above) covalently joined to an aryl group (as described above). Carbocyclic aryl groups are groups wherein the ring atoms on the aromatic ring are all carbon atoms. The carbon atoms are optionally substituted. Heterocyclic aryl groups are groups having from 1 to 3 heteroatoms as ring atoms in the aromatic ring and the remainder of the ring atoms are carbon atoms. Suitable heteroatoms include oxygen, sulfur, and nitrogen, and include furanyl, thienyl, pyridyl, pyrrolyl, N-lower alkyl pyrrolo, pyrimidyl, pyrazinyl, imidazolyl and the like, all optionally substituted. An “amide” refers to an —C(O)—NH—R, where R is either alkyl, aryl, alkylaryl or hydrogen. An “ester” refers to an —C(O)—OR′, where R is either alkyl, aryl, alkylaryl or hydrogen.

[0293] By “nucleotide” as used herein is as recognized in the art to include natural bases (standard), and modified bases well known in the art. Such bases are generally located at the 1′ position of a nucleotide sugar moiety. Nucleotides generally comprise a base, sugar and a phosphate group. The nucleotides can be unmodified or modified at the sugar, phosphate and/or base moiety, (also referred to interchangeably as nucleotide analogs, modified nucleotides, non-natural nucleotides, non-standard nucleotides and other; see, for example, Usman and McSwiggen, supra; Eckstein et al., International PCT Publication No. WO 92/07065; Usman et al., International PCT Publication No. WO 93/15187; Uhlman & Peyman, supra, all are hereby incorporated by reference herein). There are several examples of modified nucleic acid bases known in the art as summarized by Limbach et al., 1994, Nucleic Acids Res. 22, 2183. Some of the non-limiting examples of base modifications that can be introduced into nucleic acid molecules include, inosine, purine, pyridin-4-one, pyridin-2-one, phenyl, pseudouracil, 2,4,6-trimethoxy benzene, 3-methyl uracil, dihydrouridine, naphthyl, aminophenyl, 5-alkylcytidines (e.g., 5-methylcytidine), 5-alkyluridines (e.g., ribothymidine), 5-halouridine (e.g., 5-bromouridine) or 6-azapyrimidines or 6-alkylpyrimidines (e.g. 6-methyluridine), propyne, and others (Burgin et al., 1996, Biochemistry, 35, 14090; Uhlman & Peyman, supra). By “modified bases” in this aspect is meant nucleotide bases other than adenine, guanine, cytosine and uracil at 1′ position or their equivalents.

[0294] In one embodiment, the invention features modified siNA molecules, with phosphate backbone modifications comprising one or more phosphorothioate, phosphorodithioate, methylphosphonate, phosphotriester, morpholino, amidate carbamate, carboxymethyl, acetamidate, polyamide, sulfonate, sulfonamide, sulfamate, formacetal, thioformacetal, and/or alkylsilyl, substitutions. For a review of oligonucleotide backbone modifications, see Hunziker and Leumann, 1995, Nucleic Acid Analogues: Synthesis and Properties, in Modern Synthetic Methods, VCH, 331-417, and Mesmaeker et al., 1994, Novel Backbone Replacements for Oligonucleotides, in Carbohydrate Modifications in Antisense Research, ACS, 24-39.

[0295] By “abasic” is meant sugar moieties lacking a base or having other chemical groups in place of a base at the 1′ position, see for example Adamic et al., U.S. Pat. No. 5,998,203.

[0296] By “unmodified nucleoside” is meant one of the bases adenine, cytosine, guanine, thymine, or uracil joined to the 1′ carbon of β-D-ribo-furanose.

[0297] By “modified nucleoside” is meant any nucleotide base which contains a modification in the chemical structure of an unmodified nucleotide base, sugar and/or phosphate. Non-limiting examples of modified nucleotides are shown by Formulae I-VII and/or other modifications described herein.

[0298] In connection with 2′-modified nucleotides as described for the present invention, by “amino” is meant 2′-NH₂ or 2′-O—NH₂, which may be modified or unmodified. Such modified groups are described, for example, in Eckstein et al., U.S. Pat. No. 5,672,695 and Matulic-Adamic et al., U.S. Pat. No. 6,248,878, which are both incorporated by reference in their entireties.

[0299] Various modifications to nucleic acid siNA structure can be made to enhance the utility of these molecules. Such modifications will enhance shelf-life, half-life in vitro, stability, and ease of introduction of such oligonucleotides to the target site, e.g., to enhance penetration of cellular membranes, and confer the ability to recognize and bind to targeted cells.

F. Compositions for Administration

[0300] Suitable pharmaceutical compositions containing the present RNAi inducing oligonucleotides can be prepared in many different forms. In most cases, it is desirable to apply the active oligonucleotide topically to one or more hair producing skin areas on a subject. For these applications, a composition that flows, or is spreadable or sprayable is advantageous. Examples of such compositions include, for example, solutions, suspensions, emulsions, lotions, creams, gels, ointments, liposome preparations, and the like. Preparation of such pharmaceutical compositions is well-known in the art, and can be utilized for the present invention.

[0301] Thus, the oligonucleotide formulations useful in the present invention will generally include the oligonucleotide(s) and a pharmaceutically acceptable carrier, e.g., any liquid or nonliquid carrier, gel, cream, ointment, lotion, paste, emulsifier, solvent, liquid diluent, powder, or the like, which is stable with respect to all components of the topical pharmaceutical formulation and which is suitable for topical administration of oligonucleotides according to the method of the invention. Such carriers are well known in the art.

[0302] A topical carrier, as noted above, is one which is generally suited to topical drug administration and includes any such materials known in the art. The topical carrier is selected so as to provide the composition in the desired form, e.g., as a liquid, lotion, cream, paste, gel, or ointment, and may be comprised of a material of either naturally occurring or synthetic origin. It is essential, clearly, that the selected carrier not adversely affect the oligonucleotide or other components of the topical formulation. Examples of suitable topical carriers for use herein include water, alcohols and other nontoxic organic solvents, glycerin, mineral oil, silicone, petroleum jelly, lanolin, fatty acids, vegetable oils, waxes, and the like. Particularly preferred formulations herein are colorless, odorless ointments, lotions, creams and gels.

[0303] Ointments, which are semisolid preparations, are typically based on petrolatum or other petroleum derivatives. As will be appreciated by the ordinarily skilled artisan, the specific ointment base to be used is one that provides for optimum oligonucleotide delivery, and, preferably, provides for other desired characteristics as well, e.g., emolliency or the like. As with other carriers or vehicles, an ointment base should be inert, stable, nonirritating and nonsensitizing. As explained in Remington: The Science and Practice of Pharmacy, 19th Ed. (Easton, Pa.: Mack Publishing Co., 1995), at pages 1399-1404, ointment bases may be grouped in four classes: oleaginous bases; emulsifiable bases; emulsion bases; and water-soluble bases. Oleaginous ointment bases include, for example, vegetable oils, fats obtained from animals, and semisolid hydrocarbons obtained from petroleum. Emulsifiable ointment bases, also known as absorbent ointment bases, contain little or no water and include, for example, hydroxystearin sulfate, anhydrous lanolin and hydrophilic petrolatum. Emulsion ointment bases are either water-in-oil (W/O) emulsions or oil-in-water (O/W) emulsions, and include, for example, cetyl alcohol, glyceryl monostearate, lanolin and stearic acid. Preferred water-soluble ointment bases are prepared from polyethylene glycols of varying molecular weight; again, reference may be had to Remington: The Science and Practice of Pharmacy for further information.

[0304] Lotions, which are preparations that are to be applied to the skin surface without friction, are typically liquid or semiliquid preparations in which solid particles, including the oligonucleotide, are present in a water or alcohol base. Lotions are usually suspensions of solids, and preferably, for the present purpose, comprise a liquid oily emulsion of the oil-in-water type. Lotions are preferred formulations for oligonucleotide delivery to large body areas, because of the ease of applying a more fluid composition. It is generally necessary that the insoluble matter in a lotion be finely divided. Lotions will typically contain suspending agents to produce better dispersions as well as compounds useful for localizing and holding the active agent in contact with the skin, e.g., methylcellulose, sodium carboxymethyl-cellulose, or the like.

[0305] Creams containing a oligonucleotide for delivery according to the method of the invention are viscous liquid or semisolid emulsions, either oil-in-water or water-in-oil. Cream bases are water-washable, and contain an oil phase, an emulsifier and an aqueous phase. The oil phase, also sometimes called the “internal” phase, is generally comprised of petrolatum and a fatty alcohol such as cetyl or stearyl alcohol; the aqueous phase usually, although not necessarily, exceeds the oil phase in volume, and generally contains a humectant. The emulsifier in a cream formulation, as explained in Remington, supra, is generally a nonionic, anionic, cationic or amphoteric surfactant.

[0306] Gel formulations can also be used in connection with the present invention. As will be appreciated by those working in the field of topical drug formulation, gels are semisolid, suspension-type systems. Single-phase gels contain organic macromolecules distributed substantially uniformly throughout the carrier liquid, which is typically aqueous, but also, preferably, contain an alcohol and, optionally, an oil.

[0307] The oligonucleotide formulations useful in the invention also encompass sprays, that generally provide the oligonucleotide in an aqueous solution which can be misted onto the skin for delivery. Such sprays include those formulated to provide for concentration of the oligonucleotide solution at the site of administration following delivery, e.g., the spray solution can be primarily composed of alcohol or other like volatile liquid in which the oligonucleotide can be dissolved. Upon delivery to the skin, the alcohol carrier evaporates, leaving concentrated oligonucleotide at the site of administration.

[0308] The oligonucleotide formulations useful in the invention can also contain other optional such as opacifiers, anti-oxidants, gelling agents, thickening agents, stabilizers, and the like. Other agents may also be added, such as antimicrobial agents, antifungal agents, antibiotics and anti-inflammatory agents such as steroids.

[0309] The oligonucleotide formulations can include other components that, while not necessary for delivery of oligonucleotides to the skin, may enhance such delivery. For example, although it is not necessary to the practice of the invention, the oligonucleotide formulations may also contain a skin permeation enhancer. Suitable enhancers are well know in the art and include, for example, dimethylsulfoxide (DMSO), dimethyl formamide (DMF), N,N-dimethylacetamide (DMA), decylmethylsulfoxide (C.sub.10 MSO), C.sub.2-C.sub.6 alkanediols, and the 1-substituted azacycloheptan-2-ones, particularly 1-n-dodecylcyclazacycloheptan-2-one (available under the trademark Azone.RTM. from Whitby Research Incorporated, Richmond, Va.), alcohols, and the like. Preferably, the oligonucleotides delivered are substantially free of such permeation enhancers.

[0310] The additional components should not substantially interfere with the integrity or biological activity of the oligonucleotide or the formulation in which it is provided, i.e., the additional components do not adversely affect the uptake of the oligonucleotide by skin cells or chemically modify the oligonucleotide in an undesirable manner.

[0311] It will be recognized by those skilled in the art that the optimal quantity and spacing of individual dosages of oligonucleotides will be determined by the precise form and components of the oligonucleotide formulation to be delivered, the site of administration, the use to which the delivery device is applied (e.g., immunization, treatment of a condition, production of transgenic animals, etc.), and the particular subject to which the oligonucleotide formulation is to be delivered, and that such optimums can be determined by conventional techniques. It will also be appreciated by one skilled in the art that the optimal dosing regimen, i.e., the number of doses of oligonucleotides, can be ascertained using conventional methods, e.g., course of treatment determination tests. Generally, a dosing regimen will involve administration of the selected oligonucleotide formulation at least once daily, and may be one to four times daily or more.

[0312] The practice of the present invention will employ, unless otherwise indicated, conventional techniques of drug formulation, particularly topical drug formulation, which are within the skill of the art. Such techniques are fully explained in the literature. See Remington: The Science and Practice of Pharmacy, cited supra, as well as Goodman & Gilman's The Pharmacological Basis of Therapeutics, 9th Ed. (New York: McGraw-Hill, 1996).

[0313] Dosage Forms of the Oligonucleotide Formulations

[0314] The oligonucleotides can be prepared in unit dosage form (e.g., in ampules), or in multidose form. The oligonucleotides may be present in such forms as suspensions, solutions, gels, or creams, preferably in an aqueous vehicle (e.g., in a buffered solution). Alternatively, the oligonucleotide salt may be in lyophilized form for reconstitution, at the time of delivery, with a suitable vehicle, such as sterile pyrogen-free water or phosphate-buffered saline (PBS). Both liquid as well as lyophilized forms that are to be reconstituted preferably comprise agents, preferably buffers, in amounts necessary to suitably adjust the pH of the solution. Nonionic materials, such as sugars, are preferred for adjusting tonicity, and sucrose is particularly preferred. Any of these forms may further comprise suitable formulatory agents, such as starch or sugar, glycerol or saline. The compositions per unit dosage, whether liquid, gel, cream, or solid, may contain from 0.1% to 99% of oligonucleotide material.

[0315] Delivery Devices

[0316] The oligonucleotide formulation can administered using and be provided within, a delivery device (e.g., a patch, bandage, etc.) that provides for both maintenance of contact between the skin of the subject and the oligonucleotide formulation and substantially uninhibited movement of the oligonucleotide into the skin. The delivery device generally does not in and of itself facilitate movement of the oligonucleotide contained therein into the skin, but rather primarily acts to ensure that the oligonucleotide formulation is in contact with the skin for a time sufficient to allow genetic alteration of skin cells. The delivery device comprises a delivery means, or “reservoir,” which is saturated with a formulation that comprises an amount of oligonucleotide sufficient to genetic alteration of skin cells to which it is to be delivered and sufficient to elicit the desired biological effect. For example, where the delivery device is to be used to deliver a oligonucleotide for genetic immunization of a human, the delivery means of the device preferably contains an amount of oligonucleotide ranging from about 10 .mu.g to about 1,000 .mu.g, preferably from about 100 .mu.g to about 500 .mu.g.

[0317] Suitable delivery means of the delivery devices of the invention include, but are not limited to, sponges, hydrogels, and absorptive materials (e.g., gauze) that allow for retention of the oligonucleotide formulation at the site of oligonucleotide administration without substantially interfering with the delivery of oligonucleotide to the skin. It is important that, upon contact of the delivery means with the skin, the oligonucleotides contained in the delivery means diffuse or otherwise pass from the delivery means into the skin at a rate and in an amount suitable to accomplish the desired effect.

[0318] In general, the delivery means has at least two surfaces: a first surface that serves as a skin-contacting surface; and a second surface opposite the skin-contacting surface. Preferably, the second surface is in contact with a liquid-impermeable coating that substantially prevents movement of the oligonucleotide out of the delivery means through the second surface (e.g., in a direction away from the first skin-contacting surface). Preferably, the liquid-impermeable coating also decreases the rate of dehydration of the oligonucleotide formulation contained in the delivery means. In one embodiment, the first skin-contacting surface of the delivery means is associated with a liquid-impermeable, removable layer (e.g., release liner), which layer is removed just prior to placement of the first surface on the skin of a subject for administration of the oligonucleotide.

[0319] The delivery device preferably comprises an adhesive means, which can be a polymeric matrix of a pharmaceutically acceptable contact adhesive material, which serves to affix the system to the skin during drug delivery. The adhesive means facilitates retention of the delivery means on the skin at the desired site of administration. Preferably, the adhesive means comprises an adhesive substance that allows for retention of the delivery means at the desired site for a selected amount of time, but additionally allows for easy removal of the delivery means without substantially adversely affecting the skin with which the adhesive substance was in contact.

[0320] The adhesive substance used must be biocompatible with the skin of the subject, and should not substantially interfere with the delivery of oligonucleotide to the subject. Examples of suitable skin contact adhesive materials include, but are not limited to, polyethylenes, polysiloxanes, polyisobutylenes, polyacrylates, polyurethanes, and the like. The particular polymeric adhesive selected will depend on the particular oligonucleotide formulation, vehicle, etc., i.e., the adhesive must be compatible with all components of the oligonucleotide formulation.

[0321] In one embodiment, the delivery means and skin contact adhesive are present as separate and distinct layers of the delivery device, with the adhesive underlying the delivery means which, in this case, may be either a polymeric matrix as described above, or it may be a liquid or hydrogel reservoir, or may take some other form. In another embodiment, the delivery means is an adhesive bandage. Exemplary delivery devices suitable for use in the invention include, but are not limited to, those devices described in U.S. Pat. No. 5,160,328; U.S. Pat. No. 5,254,346; U.S. Pat. No. 5,714,162; U.S. Pat. No. 5,667,798; U.S. Pat. No. 5,230,896; and U.S. Pat. No. 5,260,066. Methods for preparation of suitable delivery means and other elements associated with the delivery means, such as an adhesive means are well known in the art.

[0322] In another embodiment, the oligonucleotide formulation of the invention is provided as a patch, wherein the drug composition is contained within, for example, a laminated structure that serves as a drug delivery device to be affixed to the skin. In such a structure, the oligonucleotide composition is contained within a delivery means, or “reservoir,” which lies beneath an upper backing layer. The laminated structure may contain a single reservoir, or it may contain multiple reservoirs.

[0323] The backing layer in the laminates of the patch, which serves as the upper surface of the delivery device, functions as the primary structural element of the laminated structure and provides the device with much of its flexibility. The material selected for the backing material should be selected so that it is substantially impermeable to oligonucleotide and, preferably, to other components of the oligonucleotide formulation, thus preventing loss of any components through the upper surface of the device, and preferably substantially impeding dehydration of the composition in the reservoir. The backing layer may be either occlusive or nonocclusive, depending on whether it is desired that the skin become hydrated during drug delivery. The backing is preferably made of a sheet or film of a preferably flexible elastomeric material. Examples of polymers that are suitable for the backing layer include polyethylene, polypropylene, polyesters, and the like.

[0324] During storage and prior to use, the laminated structure includes a release liner. Immediately prior to use, this layer is removed from the device to expose the skin-contacting surface of the device, which as noted above may be either the reservoir itself or a separate contact adhesive layer, so that the system may be affixed to the skin. The release liner is preferably made of a material that is substantially impermeable to the oligonucleotide and other components in the oligonucleotide formulation.

[0325] Delivery devices suitable for use in the present invention may be fabricated using conventional techniques, known in the art, for example by casting a fluid admixture of adhesive, oligonucleotide, and carrier/vehicle onto the backing layer, followed by lamination of the release liner. Similarly, the adhesive mixture may be cast onto the release liner, followed by lamination of the backing layer. Iternatively, the oligonucleotide reservoir may be prepared in the absence of oligonucleotide formulation or excipient, and then loaded by “soaking” in a drug/vehicle mixture.

[0326] As with the topical formulations of the invention, the oligonucleotide formulation contained within the delivery means of the delivery devices may contain a number of components. Furthermore, such delivery devices can be used in connection with administration of any of the oligonucleotide formulations described herein, e.g., naked oligonucleotide formulations, or lipid- or liposome-comprising oligonucleotide formulations. Regardless of the specific basic components of the oligonucleotide formulation, the oligonucleotide formulation will generally dissolved, dispersed or suspended in a suitable pharmaceutically acceptable vehicle, typically an aqueous solution or gel. Other components that may be present include preservatives, stabilizers, and the like.

[0327] Packaging of the Oligonucleotide Formulations and Delivery Devices

[0328] The units dosage ampules, multidose containers, and/or delivery devices (e.g., patches) in which the oligonucleotides are packaged prior to use may comprise an hermetically sealed container enclosing an amount of oligonucleotide or oligonucleotide formulation containing a oligonucleotide suitable for a pharmaceutically effective dose thereof, or multiples of an effective dose. The oligonucleotide is preferably packaged as a sterile formulation, and the hermetically sealed container is designed to preserve sterility of the formulation until use. Where the oligonucleotides are provided in a patch-style delivery device, the patches may be contained in a strip of individually separable packaged patches for ease in dispensing.

[0329] The container in which the oligonucleotide formulation and/or delivery device is packaged is labeled, and the label bears a notice in the form prescribed by any appropriate governmental agency. For example, where the oligonucleotides are to be administered to humans, the package comprises a notice that reflects approval by the Food and Drug Administration under the applicable federal law, of the manufacture, use, or sale of the oligonucleotide material therein for human administration. Federal law requires that the use of pharmaceutical agents in the therapy of humans be approved by an agency of the Federal government. Responsibility for enforcement is the responsibility of the Food and Drug Administration, which issues appropriate regulations for securing such approval, detailed in 21 U.S.C. §§301-392. Regulation for biologic material, comprising products made from the tissues of animals is provided under 42 U.S.C § 262. Similar approval is required by most foreign countries. Regulations vary from country to country, but the individual procedures are well known to those in the art.

[0330] Introduction of Oligonucleotides into Skin Cells According to the Method of the Invention

[0331] Application of the Oligonucleotide to Skin

[0332] Administration of the oligonucleotide is accomplished by contacting a oligonucleotide-comprising formulation (e.g., a buffered salt solution comprising the oligonucleotide) with an area of skin for a time sufficient to allow genetic alteration of skin cells. Preferably, the oligonucleotide is applied to hirsute skin. The oligonucleotide can be applied to skin without substantial pretreatment or with pretreatment, preferably without pretreatment of the skin. “Pretreatment” can generally encompass removal of hair from the skin, increasing skin permeability by mechanical means (e.g., abrasion), increasing skin permeability by application of a chemical agent to the site either before or during oligonucleotide administration, and application of an irritant or other like chemical agent to elicit a non-specific immune response or an immune response toward the irritant (e.g., by application of a keratinolytic agent). Administration of the oligonucleotide can be accomplished according to the invention without the application of an electric field or electric pulse (e.g., as in iontophoresis), without breaking the skin (e.g., by abrasion or through use of a needle), and without application of pressure to the site of administration (e.g., via jet propulsion, pressurized air, etc.). Furthermore, oligonucleotide administration can be accomplished using a oligonucleotide formulation that is substantially free of permeabilizing agents, detergents, or other chemical agents that facilitate entry of the oligonucleotide into the skin.

[0333] Once the oligonucleotide-comprising formulation is brought into contact with skin, contact is maintained for a time sufficient to allow movement of the oligonucleotide from the formulation into skin and into skin cells. In general, the time of contact between the oligonucleotide and the skin will be at least about 1 min to about 1 hr or more, preferably at least about 30 min. Because there is substantially no toxicity associated with contacting the oligonucleotide with the skin, the time of contact maintained between the oligonucleotide and the skin to which the oligonucleotide is to be delivered is limited only by such factors as the ability to keep the oligonucleotide in a suitable delivery form (e.g., a time during which the oligonucleotide-comprising solution can be prevented from dehydrating) and the ability to physically maintain contact between the oligonucleotide and the site of delivery (e.g., maintenance of a patch comprising the oligonucleotide(s) on the skin). Therefore, the time of contact of a single dose can be as long as several hours to several days, and may be weeks or more. Furthermore, the time of delivery can be further extended by additional subsequent applications of the oligonucleotide to the same or different delivery site on the skin.

[0334] While an ethanolic/propylene glycol solution of anti-dsg4, anti-nude, and/or anti-hairless oligonucleotide as found to deliver beneficial amounts of oligonucleotide to the hair follicle and result in inhibition of the respective mRNAs, other formulations can also advantageously be used. In particular, liposome compositions can be advantageous. Liposomes were introduced first in about 1980 for topical drug delivery and have since attracted considerable interest due to their potential utility both as a drug carrier and a reservoir for controlled release of drugs within various layers of the skin and the hair follicle. In addition to reducing the undesirable high systemic absorption of topically applied drugs, the major advantage of liposomes compared to other formulations such as ointments or creams, is based on their ability to create a depot, from which the drug is slowly released. The delivery agents also provide advantages in that they protect oligonucleotides against degradation, increase cellular uptake, and may target the drug to specific cells or tissue compartment. Thus, a delivery system allowing the controlled and sustained release of oligonucleotides in vivo can greatly increase the efficacy of gene inhibition technology.

[0335] One of the most favored sites of liposome penetration is into the hair follicle, since the hair canal opens directly onto the surface of the skin. Liposomes applied to cultured hair follicles are easily detected in cells lining the inner root sheath. (Li et al., 1992b, In Vitro Cell Dev Biol 28A:679-681.) Liposomes also find their way into the pilosebaceous unit once traveling down the root sheath. (Lieb et al. 1992, J Invest Dermatol 99:108-113.) Liposomes have been shown to direct compounds into the sebaceous gland, when they would otherwise be trapped in the stratum corneum. (Bernard et al., 1997, J Pharm Sci 86:573-578.) Liposomes function both as a controlled release system and as a delivery system transporting encapsulated substances into cells. After topical application, and upon drying, the liposomes develop into a structured film that fills the follicular openings, intimately mixing with the follicular contents, and fostering drug diffusion to the depths of the follicles.

[0336] A number of different compositions of liposomes have been tested for in vivo oligonucleotide delivery. For example, three different lipids were compared: N-[1-(2,3dioleoyloxy)propyl]-N,N,N-trimethyl ammonium chloride (DOTMA), 2,3-dioleyloxy-N-[2(sperminecarboxamido)ethyl]-N,N-dimethyl-1-propanaminium trifluoroacetate (DOSPA) and N-(1-(2,3-dimyristyloxypropyl)-N,Ndimethyl-(2-hydroxyethyl)ammonium bromide (DMRIE). The macrophages incorporated tenfold more oligonucleotide when delivered in conjunction with DOSPA than with the other cationic lipids.

[0337] Liposome preparation and encapsulation of oligonculeotides are available from commercial manufacturer, e.g., BioZone Laboratories, Inc. Pittsburg, Calif., which manufactures a wide range of topically applied LipoCeutical products that include cationic lipids.

[0338] In addition to cationic lipid liposomes, other types of liposomes can also be used, e.g. pH-senstive liposomes. The cellular uptake of liposomes passes mainly through an endocytic pathway, and occasionally, liposomes and their contents inadvertently arrive in the lysosomes where they are degraded. The quantity of oligonucleotides that can avoid degradation and reach their nuclear or cytoplasmic target is probably very low. To overcome lysosomal degradation and in order to increase the efficiency of delivery, pH sensitive fusogenic liposomes have been used. These consist of a non-bilayer-forming lipid such as dioleylphosphatidylethanolamine (DOPE) and a titratable acidic amphiphile such as oleic acid (OA) or cholesterylhemisuccinate (CHEMS). (DeOliveira et al., 1998, Biochim. Biophys. Acta Biomembr. 1372:301-310.) At pH 7, the amphiphile maintains the lipid mix in a bilayer (liposome) structure. However, as the complex moves through the endosomes, the pH drops and the amphiphile becomes protonated. This causes the liposome to collapse resulting in fusion with the endosomal membrane and release of the liposome contents into the cytoplasm. However, the anionic nature of pH-sensitive liposomes may lead to poor encapsulation of ODNs. (Hughes et al., 2000, Methods Enzymol 313:342-358.).

[0339] As one alternative to liposomes, other carriers/delivery agents can be used, such as cationic polymers. The most widely studied polymers are polylactides and co-polymers of lactic acid and glycolic acid P(LA-GA) and both of these have been evaluated for the use for delivery of oligonucleotides. (Lewis et al., 1998, J Drug Target 5:291-302; Hudson et al., 1999, Int J Pharm 182:49-58.)

[0340] In addition to the above, certain patents have described methods for delivery that can be used in the present invention. Examples include the following.

[0341] Li and Lishko, U.S. Pat. No. 5,914,126 (incorporated herein by reference in its entirety) describes methods to deliver macromolecules to hair follicles, where the method involves applying to the skin a formulation that includes a macromolecule, such as a nucleic acid, in a liposomal formulation, such that the liposimes target the macromolecule selectively into hair follicle cells by transfer into the follicle without entry into the circulation of the adjacent skin tissue.

[0342] Khavari et al., U.S. Pat. No. 6,087,341 (incorporated herein by reference in its entirety) describes methods and compositions for introduction of nucleic acid into skin cells by topical application.

[0343] Li and Baranov, U.S. Pat. No. 6,080,127 (incorporated herein by reference in its entirety) describes a skin vibration method for topical targeted delivery of beneficial agents into hair follicles. The vibration frequency can, for example, be about 1 Hz to 100 Hz.

[0344] In some applications, it may be useful to include transdermal penetration enhancers, for example, as described in Karande et al., 2004, Nature Biotech. 192-197. As described, two types of compositions were particularly effective. One included sodium laureth sulfate (SLA) with phenyl piperazine (PP). In a particular composition the SLA:PP was as 0.5% (w/v) with the weight ration of SLA=0.7 in the combination. The second included N-lauroyl sarcosine (NLS) with sorbitan monolaurate (S20). In a particular composition, the combination was at 1.0% (w/v) with the weight ration of NLS=0.6.

G. Administration

[0345] The present compositions can be administered in various ways, e.g., depending on the condition to be treated, and the type of composition to be used. In many cases, topical administration will be used. This mode of administration is particularly suitable for local hair removal.

[0346] In some applications, hair removal is desired in only a portion of the skin area of a subject. In those cases, the composition can be applied locally.

[0347] Exemplary Topical Application Methods

[0348] Spreading

[0349] In most cases, the composition containing the RNAi inducing oligonucleotides will be spread or wiped on the treatment area to form a thin film. Thus, for example, for any of the forms of liquid suspension or solution, cream, lotion, gel, or ointment, a quantity of the composition is spread on the treatment surface or surfaces of the subject, and left for a time to allow oligoncleotides (which may be in a carrier species such as in liposomes, to migrate to the hair follicles.

[0350] Spraying

[0351] For compositions that are sufficiently liquid, the composition can be sprayed on the treatment site, either with or without protection against overspray on surrounding areas. For spray applications, it may be desirable to protect against inhalation of sprayed material, e.g., by using masks that will filter out the relevant sized aerosol particles.

[0352] Injection

[0353] In some applications, it will be desirable to remove only specific hairs. Thus, rather than contacting a particular area, a composition will be delivered to one or more particular hair follicles. Such individual follicle delivery can be accomplished in various ways. For example, a drop of liquid containing the active oligonucleotide(s) can be deposited on the hair shaft, and allowed to migrate down the shaft to the follicle. In another approach, a needle can be inserted in the hair channel, and liquid or other composition deposited at or near the follicle.

[0354] Application Site Preparation and Hair Cycle Synchronization

[0355] In some cases, the present compositions can be applied without any special preparation of the application site. In other cases, however, it is advantageous to prepare the site, e.g., by preliminary removal of hair from the site and/or to combine the present invention with a supplementary method of hair removal. Such removal can be beneficial in several different ways. For example, such removal can reduce the amount of active agent required for the present invention because the material will not be lost by adhering to the hair, and instead will be available for absorption/migration to the hair follicles.

[0356] Such removal can also be beneficially be used to supplement the present invention by removing residual hairs. Depending on the manner and amount of RNAi inducing oligonucleotide delivered to the hair follicles, some of the follicles may not be sufficiently inhibited, such that some hairs may grow in the treated area and/or some hairs may be reduced in thickness or length but still present. In such cases, a supplementary method of hair removal can be used to produce a desired level of hair removal, e.g., shaving, chemical depilation, enzymatic hair removal; laser treatment; electrolysis. Certain embodiments of the present invention include such an supplemental method.

[0357] It can also be advantageous to synchronize hair cycles in the treatment area. Such synchronization can advantageously be done prior to application of the present compositions, or during an interval of treatment with the present compositions, or in an interval between two occasions or intervals of application of the present compositions.

[0358] Such synchronization can be accomplished, for example, by pulling hairs from the follicles (either individually or in larger numbers). Examples of methods for pulling the hairs include plucking and waxing. In some circumstances it will be necessary/desirable to induce follicle synchrony by molecular means. In these instances, skin is treated with a known follicle growth inducer such as cyclosporin A, TPA, Noggin, estrogen receptor agonist, and the like.

[0359] In general, if a hair is pulled from a follicle in anagen, that follicle goes into catagen; if a hair is pulled from a follicle in telogen, the follicle is stimulated to produce hair, and thus goes into anagen. Thus, for a more extensive effect using the present invention, a distribution of hairs in anagen, catagen, and telogen can be synchronized in catagen, with one pulling to push anagen follicles to catagen, and two pullings to stimulate telogen follicles to anagen, and then push the newly anagen follicles to catagen. Depending on the reaction of the follicles, such procedure can produce a single phase synchrony, or a two phase synchrony. An example is provided below for inhibition of hairless using siRNA. Inhibition of dsg4 and/or nude can be carried out similarly using siRNA targeted to the respective mRNA.

### EXAMPLE 1

### In Vitro siRNA Inhibition of Hairless mRNA

[0360] siRNAs were commercially obtained from Ambion, Inc. for human and mouse hairless genes. These are validated, chemically synthesized siRNAs, that are HPLC purified, annealed and ready to use, and guaranteed to reduce target gene expression by 70% or more. For both human and mouse transcripts, two different siRNAs were used. The sequence of the hairless siRNAs is given in the following table. In this and the subsequent tables in this example, upper case letter are used to refer to the human homologs, and lower case letter refer to the mouse homologs of the specified genes.

[0361] List of pre-designed siRNAs used for gene silencing experiments.

| | | |
|---|---|---|
| siRNA | Sense Sequence | Antisense Sequence |

| | | |
|---|---|---|
| HR#1 | 5′-GGACAUGCUCCCACUUGUGtt-3′ | 5′-CACAAGUGGGAGCAUGUCCtt-3′ |
| | (SEQ ID NO: 12,501) | (SEQ ID NO: 12,502) |
| HR#2 | 5′-GGAGGCCAUGCUUACCCAUtt-3′ | 5′-AUGGGUAAGCAUGGCCUCCtt-3′ |
| | (SEQ ID NO: 12,503) | (SEQ ID NO: 12,504) |
| hr#1 | 5′-GGACACACUCUCACUGGUGtt-3′ | 5′-CACCAGUGAGAGUGUGUCCtt-3′ |
| | (SEQ ID NO: 12,505) | (SEQ ID NO: 12,506) |
| hr#2 | 5′-GGGCUUUUACCACAAGGAUtt-3′ | 5′-AUCCUUGUGGUAAAAGCCCtt-3′ |
| | (SEQ ID NO: 12,507) | (SEQ ID NO: 12,508) |

[0362] We also used siRNAs for the mouse glyceraldehyde-3-phosphate dehydrogenase (gapdh) gene, Silencer™ GAPDH siRNA (Cat no. 4605, Ambion, Inc. Austin, Tex.) as controls to monitor and optimize siRNA experiments.

[0363] Human HaCaT, HeLa and mouse NIH 3T3 cells were used in siRNA transfection experiments. Cells were plated on 6-well tissue culture plates in Dulbecco's Modified Eagle Media (D-MEM, Cat no. 10569-010, Invitrogen Corp., Carlsbad, Calif.) with 10% Fetal Bovine Serum (Cat no. 16000-044, Invitrogen, Corp.) so that they were 30-50% confluent at the time of transfection. Immediately before the transfection, the cells were washed in Opti-MEM I Reduced Serum Medium (Cat no. 31985-070, Invitrogen, Inc.). We used 200 pmol of short interfering RNA (siRNA) for each well and the Oligofectamine™ reagent. The transfections were performed according to the manufacturer's instructions (Cat no. 12252-011, Invitrogen, Inc).

[0364] Total RNA was isolated 24 and 48 hours post-transfection using the RNeasy Mini Kit (Cat no. 74104, QIAGEN, Inc., Valencia, Calif.) according to the manufacturer's instructions. cDNA synthesis was performed using the SuperScript First-Strand Synthesis System for RT-PCR kit (Cat no. 11904-018, Invitrogen, Corp.) and oligo (dT) primers. Gene activity was determined by the Real-Time quantitative RT-PCR (qRT-PCR) technique.

[0365] Real Time Quantitative RT-PCR (qRT-PCR)

[0366] Real-Time qRT-PCR was performed using MJ Research Opticon 2 continuous fluorescence detector. For qRT-PCR 40 ng of cDNA obtained from cultured HaCaT, HeLa, and NIH3T3 cells (siRNA treated and untreated), was amplified using the MJ Research DyNAmo Hot Start SYBR Green qPCR kit (Cat no. F-410L, MJ Research, Inc., Waltham, Mass. The DyNAmo Hot Start SYBR Green qPCR kit is a master mix of a modified hot start DNA polymerase with SYBR Green I and the appropriate buffers, all of which have been optimized for real-time quantitative analysis with the MJ Research Opticon 2. PCR amplification of cDNA samples was performed in 96 well optical plates under the following conditions:

1. Incubate at 95.0 C for 00:10:00

2. Incubate at 95.0 C for 00:00:20

3. Incubate at 55.0 C for 00:00:30

4. Incubate at 72.0 C for 00:00:40

5. Plate Read

6. Incubate at 77.0 C for 00:00:01

7. Plate Read

8. Go to line 3 for 39 more times

9. Incubate at 72.0 C for 00:05:00

10. Melting Curve from 65.0 C to 95.0 C read every 0.2 C hold 00:00:01

11. Incubate at 72.0 C for 00:05:00

END

[0367] The list of PCR primers used for Real Time PCR amplifications is given in the following table.

[0368] PCR primers used for Real-Time RT-PCR amplifications of mouse and human hairless, mouse glyceraldehyde-3-phosphate dehydrogenase gene, and hypoxanthine guanine phosphoriboxyltransferase I (hprt). (HPRT was used as a normalizing internal control in mouse cells the same way GAPDH was used for the human cell lines.)

| | | |
|---|---|---|
| Gene | Forward primer | Reverse primer |

| | | |
|---|---|---|
| Hr | 5′-TTCTACCGCGGTCAAACTCT-3′ | 5′-TTGGTGTCAGGGATCCAAAG-3′ |
| | (SEQ ID NO: 12,509) | (SEQ ID NO: 12,510) |
| GAPDH | 5′-AGCCACATCGCTCAGAACAC-3′ | 5′-GAGGCATTGCTGATGATCTTG-3′ |
| | (SEQ ID NO: 12,511) | (SEQ ID NO: 12,512) |
| hr | 5′-ACATCAAAGAAGAGACCCCAG-3′ | 5′-TTCGCACTGGTGACAATGGAA-3′ |
| | (SEQ ID NO: 12,513) | (SEQ ID NO: 12,514) |
| gapdh | 5′-GTGAACGGATTTGGCCGTATT-3′ | 5′-TTTTGGCTCCACCCTTCAAGT-3′ |
| | (SEQ ID NO: 12,515) | (SEQ ID NO: 12,516) |
| hplt | 5′-CCCTGGTTAAGCAGTACAGC-3′ | 5′-CAGGACTAGAACACCTGCTAA-3′ |
| | (SEQ ID NO: 12,517) | (SEQ ID NO: 12,518) |

[0369] Plate readings for fluorescence levels are taken at two steps, 5 and 7. These values indicate the relative amounts of amplicon per well at a particular cycle. The raw numbers obtained from these readings were used to determine the PCR amplification efficiency. This is the measurement of fold amplification per PCR cycle, and is expressed as a fraction or percentage relative to perfect doubling. A PCR resulting in perfect doubling would exhibit 100% amplification efficiency. All of the calculations are done using the LinRegPCR program by J. M. Ruijter and C. Ramakers. The crossing threshold for the experiment is determined manually and is defined at the cycle at which amplification for all samples becomes logarithmic. The relative fold for each amplicon is then determined using the amplification efficiency and crossing threshold for that particular amplicon and normalizing it against the relative starting amounts, which is determined by the GAPDH amplification efficiency and crossing threshold that corresponds to that sample. This is done using parameters and equations set by Lui and Saint (Analytical Biochemistry 302, 52-59 (2002)). The final values can then be used to compare the fold differences in gene expression of a particular gene across several different samples or conditions.

[0370] This technique and analysis can be applied to determine the levels of hairless expression, or more specifically, the efficiency of gene silencing using hairless siRNA through comparison of the treated and untreated cell populations.

[0371] The following table shows the percentage of gene silencing observed following siRNA treatment of human HeLa and HaCaT cells. Total RNA was collected 48 hours following transfection with siRNAs for hairless (Hr) gene. Gene activity was assayed by real-time quantitative RT-PCR (qRT-PCR) technique. Percent knockdown is calculated by obtaining the ratio of the normalized level of Hr expression in treated and untreated cell populations and subtracting this value from 1 (100% expression).

| | Gene | | | |
|---|---|---|---|---|
| | Expression | Cell | Percent | RNA isolation |
| siRNA | Tested | Type | Knockdown | time point |
| HR#1 | Hr | HeLa | 97.3% | 48 hours |
| HR#2 | Hr | HeLa | 98.7% | 48 hours |
| HR#2 | Hr | HaCaT | 95.8% | 48 hours |

[0372] The following table shows the percentage of gene silencing observed following siRNA treatment of mouse NIH3T3 cells. Total RNA was collected 48 hours following transfection with siRNAs for hairless (hr) and glyceraldehyde-3-phosphate dehydrogenase (gapdh) genes. Gene activity was assayed by real-time quantitative RT-PCR (qRT-PCR) technique. Percent knockdown is calculated by obtaining the ratio of the normalized level of hr and gapdh expression in treated and untreated cell populations and subtracting this value from 1 (100% expression).

| | Gene | | | |
|---|---|---|---|---|
| | Expression | Cell | Percent | RNA isolation |
| siRNA | Tested | Type | Knockdown | time point |
| hr#1 | Hr | NIH3T3 | 99.3% | 48 hours |
| hr#2 | Hr | NIH3T3 | 99.17% | 48 hours |
| Gapdh | Gapdh | NIH3T3 | 99.3% | 48 hours |

[0373] Dsg4 and nude mRNA translation can be inhibited in like manner.

[0374] All patents and other references cited in the specification are indicative of the level of skill of those skilled in the art to which the invention pertains, and are incorporated by reference in their entireties, including any tables and figures, to the same extent as if each reference had been incorporated by reference in its entirety individually.

[0375] One skilled in the art would readily appreciate that the present invention is well adapted to obtain the ends and advantages mentioned, as well as those inherent therein. The methods, variances, and compositions described herein as presently representative of preferred embodiments are exemplary and are not intended as limitations on the scope of the invention. Changes therein and other uses will occur to those skilled in the art, which are encompassed within the spirit of the invention, are defined by the scope of the claims.

[0376] It will be readily apparent to one skilled in the art that varying substitutions and modifications may be made to the invention disclosed herein without departing from the scope and spirit of the invention. For example, variations can be made to the number, length, and chemical modifications in the dsRNA. Thus, such additional embodiments are within the scope of the present invention and the following claims.

[0377] The invention illustratively described herein suitably may be practiced in the absence of any element or elements, limitation or limitations which is not specifically disclosed herein. Thus, for example, in each instance herein any of the terms “comprising”, “consisting essentially of” and “consisting of” may be replaced with either of the other two terms. The terms and expressions which have been employed are used as terms of description and not of limitation, and there is no intention that in the use of such terms and expressions of excluding any equivalents of the features shown and described or portions thereof, but it is recognized that various modifications are possible within the scope of the invention claimed. Thus, it should be understood that although the present invention has been specifically disclosed by preferred embodiments and optional features, modification and variation of the concepts herein disclosed may be resorted to by those skilled in the art, and that such modifications and variations are considered to be within the scope of this invention as defined by the appended claims.

[0378] In addition, where features or aspects of the invention are described in terms of Markush groups or other grouping of alternatives, those skilled in the art will recognize that the invention is also thereby described in terms of any individual member or subgroup of members of the Markush group or other group.

[0379] Also, unless indicated to the contrary, where various numerical values are provided for embodiments, additional embodiments are described by taking any 2 different values as the endpoints of a range. Such ranges are also within the scope of the described invention.

[0380] Thus, additional embodiments are within the scope of the invention and within owing claims.

TABLE 1

cDNA Human Desmoglein 4 19-mer Target
Sequences and Complement “NM_177986 -
Homo sapiens Desmoglein 4 (DSG4),
complete mRNA (1-3579 bp)”

| | | | |
|---|---|---|---|
| SEQ | | SEQ | |
| ID | | ID | |
| NO: | Sense (5′-3′) | No: | Antisense (5′-3′) |

| | | | |
|---|---|---|---|
| 1 | CACCACAGTTATCACCCAT | 3562 | ATGGGTGATAACTGTGGTG |
| 2 | ACCACAGTTATCACCCATG | 3563 | CATGGGTGATAACTGTGGT |
| 3 | CCACAGTTATCACCCATGC | 3564 | GCATGGGTGATAACTGTGG |
| 4 | CACAGTTATCACCCATGCC | 3565 | GGCATGGGTGATAACTGTG |
| 5 | ACAGTTATCACCCATGCCC | 3566 | GGGCATGGGTGATAACTGT |
| 6 | CAGTTATCACCCATGCCCT | 3567 | AGGGCATGGGTGATAACTG |
| 7 | AGTTATCACCCATGCCCTC | 3568 | GAGGGCATGGGTGATAACT |
| 8 | GTTATCACCCATGCCCTCC | 3569 | GGAGGGCATGGGTGATAAC |
| 9 | TTATCACCCATGCCCTCCT | 3570 | AGGAGGGCATGGGTGATAA |
| 10 | TATCACCCATGCCCTCCTA | 3571 | TAGGAGGGCATGGGTGATA |
| 11 | ATCACCCATGCCCTCCTAA | 3572 | TTAGGAGGGCATGGGTGAT |
| 12 | TCACCCATGCCCTCCTAAA | 3573 | TTTAGGAGGGCATGGGTGA |
| 13 | CACCCATGCCCTCCTAAAA | 3574 | TTTTAGGAGGGCATGGGTG |
| 14 | ACCCATGCCCTCCTAAAAG | 3575 | CTTTTAGGAGGGCATGGGT |
| 15 | CCCATGCCCTCCTAAAAGG | 3576 | CCTTTTAGGAGGGCATGGG |
| 16 | CCATGCCCTCCTAAAAGGG | 3577 | CCCTTTTAGGAGGGCATGG |
| 17 | CATGCCCTCCTAAAAGGGT | 3578 | ACCCTTTTAGGAGGGCATG |
| 18 | ATGCCCTCCTAAAAGGGTG | 3579 | CACCCTTTTAGGAGGGCAT |
| 19 | TGCCCTCCTAAAAGGGTGT | 3580 | ACACCCTTTTAGGAGGGCA |
| 20 | GCCCTCCTAAAAGGGTGTC | 3581 | GACACCCTTTTAGGAGGGC |
| 21 | CCCTCCTAAAAGGGTGTCT | 3582 | AGACACCCTTTTAGGAGGG |
| 22 | CCTCCTAAAAGGGTGTCTC | 3583 | GAGACACCCTTTTAGGAGG |
| 23 | CTCCTAAAAGGGTGTCTCA | 3584 | TGAGACACCCTTTTAGGAG |
| 24 | TCCTAAAAGGGTGTCTCAA | 3585 | TTGAGACACCCTTTTAGGA |
| 25 | CCTAAAAGGGTGTCTCAAA | 3586 | TTTGAGACACCCTTTTAGG |
| 26 | CTAAAAGGGTGTCTCAAAG | 3587 | CTTTGAGACACCCTTTTAG |
| 27 | TAAAAGGGTGTCTCAAAGC | 3588 | GCTTTGAGACACCCTTTTA |
| 28 | AAAAGGGTGTCTCAAAGCA | 3589 | TGCTTTGAGACACCCTTTT |
| 29 | AAAGGGTGTCTCAAAGCAT | 3590 | ATGCTTTGAGACACCCTTT |
| 30 | AAGGGTGTCTCAAAGCATA | 3591 | TATGCTTTGAGACACCCTT |
| 31 | AGGGTGTCTCAAAGCATAT | 3592 | ATATGCTTTGAGACACCCT |
| 32 | GGGTGTCTCAAAGCATATC | 3593 | GATATGCTTTGAGACACCC |
| 33 | GGTGTCTCAAAGCATATCT | 3594 | AGATATGCTTTGAGACACC |
| 34 | GTGTCTCAAAGCATATCTT | 3595 | AAGATATGCTTTGAGACAC |
| 35 | TGTCTCAAAGCATATCTTT | 3596 | AAAGATATGCTTTGAGACA |
| 36 | GTCTCAAAGCATATCTTTC | 3597 | GAAAGATATGCTTTGAGAC |
| 37 | TCTCAAAGCATATCTTTCT | 3598 | AGAAAGATATGCTTTGAGA |
| 38 | CTCAAAGCATATCTTTCTG | 3599 | CAGAAAGATATGCTTTGAG |
| 39 | TCAAAGCATATCTTTCTGT | 3600 | ACAGAAAGATATGCTTTGA |
| 40 | CAAAGCATATCTTTCTGTA | 3601 | TACAGAAAGATATGCTTTG |
| 41 | AAAGCATATCTTTCTGTAG | 3602 | CTACAGAAAGATATGCTTT |
| 42 | AAGCATATCTTTCTGTAGA | 3603 | TCTACAGAAAGATATGCTT |
| 43 | AGCATATCTTTCTGTAGAG | 3604 | CTCTACAGAAAGATATGCT |
| 44 | GCATATCTTTCTGTAGAGC | 3605 | GCTCTACAGAAAGATATGC |
| 45 | CATATCTTTCTGTAGAGCA | 3606 | TGCTCTACAGAAAGATATG |
| 46 | ATATCTTTCTGTAGAGCAG | 3607 | CTGCTCTACAGAAAGATAT |
| 47 | TATCTTTCTGTAGAGCAGA | 3608 | TCTGCTCTACAGAAAGATA |
| 48 | ATCTTTCTGTAGAGCAGAA | 3609 | TTCTGCTCTACAGAAAGAT |
| 49 | TCTTTCTGTAGAGCAGAAT | 3610 | ATTCTGCTCTACAGAAAGA |
| 50 | CTTTCTGTAGAGCAGAATT | 3611 | AATTCTGCTCTACAGAAAG |
| 51 | TTTCTGTAGAGCAGAATTC | 3612 | GAATTCTGCTCTACAGAAA |
| 52 | TTCTGTAGAGCAGAATTCG | 3613 | CGAATTCTGCTCTACAGAA |
| 53 | TCTGTAGAGCAGAATTCGG | 3614 | CCGAATTCTGCTCTACAGA |
| 54 | CTGTAGAGCAGAATTCGGA | 3615 | TCCGAATTCTGCTCTACAG |
| 55 | TGTAGAGCAGAATTCGGAA | 3616 | TTCCGAATTCTGCTCTACA |
| 56 | GTAGAGCAGAATTCGGAAC | 3617 | GTTCCGAATTCTGCTCTAC |
| 57 | TAGAGCAGAATTCGGAACT | 3618 | AGTTCCGAATTCTGCTCTA |
| 58 | AGAGCAGAATTCGGAACTG | 3619 | CAGTTCCGAATTCTGCTCT |
| 59 | GAGCAGAATTCGGAACTGA | 3620 | TCAGTTCCGAATTCTGCTC |
| 60 | AGCAGAATTCGGAACTGAG | 3621 | CTCAGTTCCGAATTCTGCT |
| 61 | GCAGAATTCGGAACTGAGA | 3622 | TCTCAGTTCCGAATTCTGC |
| 62 | CAGAATTCGGAACTGAGAA | 3623 | TTCTCAGTTCCGAATTCTG |
| 63 | AGAATTCGGAACTGAGAAG | 3624 | CTTCTCAGTTCCGAATTCT |
| 64 | GAATTCGGAACTGAGAAGA | 3625 | TCTTCTCAGTTCCGAATTC |
| 65 | AATTCGGAACTGAGAAGAC | 3626 | GTCTTCTCAGTTCCGAATT |
| 66 | ATTCGGAACTGAGAAGACG | 3627 | CGTCTTCTCAGTTCCGAAT |
| 67 | TTCGGAACTGAGAAGACGA | 3628 | TCGTCTTCTCAGTTCCGAA |
| 68 | TCGGAACTGAGAAGACGAG | 3629 | CTCGTCTTCTCAGTTCCGA |
| 69 | CGGAACTGAGAAGACGAGG | 3630 | CCTCGTCTTCTCAGTTCCG |
| 70 | GGAACTGAGAAGACGAGGG | 3631 | CCCTCGTCTTCTCAGTTCC |
| 71 | GAACTGAGAAGACGAGGGC | 3632 | GCCCTCGTCTTCTCAGTTC |
| 72 | AACTGAGAAGACGAGGGCT | 3633 | AGCCCTCGTCTTCTCAGTT |
| 73 | ACTGAGAAGACGAGGGCTC | 3634 | GAGCCCTCGTCTTCTCAGT |
| 74 | CTGAGAAGACGAGGGCTCA | 3635 | TGAGCCCTCGTCTTCTCAG |
| 75 | TGAGAAGACGAGGGCTCAA | 3636 | TTGAGCCCTCGTCTTCTCA |
| 76 | GAGAAGACGAGGGCTCAAA | 3637 | TTTGAGCCCTCGTCTTCTC |
| 77 | AGAAGACGAGGGCTCAAAT | 3638 | ATTTGAGCCCTCGTCTTCT |
| 78 | GAAGACGAGGGCTCAAATT | 3639 | AATTTGAGCCCTCGTCTTC |
| 79 | AAGACGAGGGCTCAAATTG | 3640 | CAATTTGAGCCCTCGTCTT |
| 80 | AGACGAGGGCTCAAATTGA | 3641 | TCAATTTGAGCCCTCGTCT |
| 81 | GACGAGGGCTCAAATTGAA | 3642 | TTCAATTTGAGCCCTCGTC |
| 82 | ACGAGGGCTCAAATTGAAT | 3643 | ATTCAATTTGAGCCCTCGT |
| 83 | CGAGGGCTCAAATTGAATC | 3644 | GATTCAATTTGAGCCCTCG |
| 84 | GAGGGCTCAAATTGAATCT | 3645 | AGATTCAATTTGAGCCCTC |
| 85 | AGGGCTCAAATTGAATCTC | 3646 | GAGATTCAATTTGAGCCCT |
| 86 | GGGCTCAAATTGAATCTCA | 3647 | TGAGATTCAATTTGAGCCC |
| 87 | GGCTCAAATTGAATCTCAC | 3648 | GTGAGATTCAATTTGAGCC |
| 88 | GCTCAAATTGAATCTCACA | 3649 | TGTGAGATTCAATTTGAGC |
| 89 | CTCAAATTGAATCTCACAG | 3650 | CTGTGAGATTCAATTTGAG |
| 90 | TCAAATTGAATCTCACAGG | 3651 | CCTGTGAGATTCAATTTGA |
| 91 | CAAATTGAATCTCACAGGA | 3652 | TCCTGTGAGATTCAATTTG |
| 92 | AAATTGAATCTCACAGGAT | 3653 | ATCCTGTGAGATTCAATTT |
| 93 | AATTGAATCTCACAGGATT | 3654 | AATCCTGTGAGATTCAATT |
| 94 | ATTGAATCTCACAGGATTT | 3655 | AAATCCTGTGAGATTCAAT |
| 95 | TTGAATCTCACAGGATTTG | 3656 | CAAATCCTGTGAGATTCAA |
| 96 | TGAATCTCACAGGATTTGC | 3657 | GCAAATCCTGTGAGATTCA |
| 97 | GAATCTCACAGGATTTGCG | 3658 | CGCAAATCCTGTGAGATTC |
| 98 | AATCTCACAGGATTTGCGT | 3659 | ACGCAAATCCTGTGAGATT |
| 99 | ATCTCACAGGATTTGCGTG | 3660 | CACGCAAATCCTGTGAGAT |
| 100 | TCTCACAGGATTTGCGTGC | 3661 | GCACGCAAATCCTGTGAGA |
| 101 | CTCACAGGATTTGCGTGCA | 3662 | TGCACGCAAATCCTGTGAG |
| 102 | TCACAGGATTTGCGTGCAA | 3663 | TTGCACGCAAATCCTGTGA |
| 103 | CACAGGATTTGCGTGCAAG | 3664 | CTTGCACGCAAATCCTGTG |
| 104 | ACAGGATTTGCGTGCAAGA | 3665 | TCTTGCACGCAAATCCTGT |
| 105 | CAGGATTTGCGTGCAAGAG | 3666 | CTCTTGCACGCAAATCCTG |
| 106 | AGGATTTGCGTGCAAGAGA | 3667 | TCTCTTGCACGCAAATCCT |
| 107 | GGATTTGCGTGCAAGAGAA | 3668 | TTCTCTTGCACGCAAATCC |
| 108 | GATTTGCGTGCAAGAGAAA | 3669 | TTTCTCTTGCACGCAAATC |
| 109 | ATTTGCGTGCAAGAGAAAC | 3670 | GTTTCTCTTGCACGCAAAT |
| 110 | TTTGCGTGCAAGAGAAACC | 3671 | GGTTTCTCTTGCACGCAAA |
| 111 | TTGCGTGCAAGAGAAACCC | 3672 | GGGTTTCTCTTGCACGCAA |
| 112 | TGCGTGCAAGAGAAACCCA | 3673 | TGGGTTTCTCTTGCACGCA |
| 113 | GCGTGCAAGAGAAACCCAA | 3674 | TTGGGTTTCTCTTGCACGC |
| 114 | CGTGCAAGAGAAACCCAAA | 3675 | TTTGGGTTTCTCTTGCACG |
| 115 | GTGCAAGAGAAACCCAAAG | 3676 | CTTTGGGTTTCTCTTGCAC |
| 116 | TGCAAGAGAAACCCAAAGG | 3677 | CCTTTGGGTTTCTCTTGCA |
| 117 | GCAAGAGAAACCCAAAGGA | 3678 | TCCTTTGGGTTTCTCTTGC |
| 118 | CAAGAGAAACCCAAAGGAA | 3679 | TTCCTTTGGGTTTCTCTTG |
| 119 | AAGAGAAACCCAAAGGAAT | 3680 | ATTCCTTTGGGTTTCTCTT |
| 120 | AGAGAAACCCAAAGGAATG | 3681 | CATTCCTTTGGGTTTCTCT |
| 121 | GAGAAACCCAAAGGAATGG | 3682 | CCATTCCTTTGGGTTTCTC |
| 122 | AGAAACCCAAAGGAATGGA | 3683 | TCCATTCCTTTGGGTTTCT |
| 123 | GAAACCCAAAGGAATGGAT | 3684 | ATCCATTCCTTTGGGTTTC |
| 124 | AAACCCAAAGGAATGGATT | 3685 | AATCCATTCCTTTGGGTTT |
| 125 | AACCCAAAGGAATGGATTG | 3686 | CAATCCATTCCTTTGGGTT |
| 126 | ACCCAAAGGAATGGATTGG | 3687 | CCAATCCATTCCTTTGGGT |
| 127 | CCCAAAGGAATGGATTGGC | 3688 | GCCAATCCATTCCTTTGGG |
| 128 | CCAAAGGAATGGATTGGCT | 3689 | AGCCAATCCATTCCTTTGG |
| 129 | CAAAGGAATGGATTGGCTC | 3690 | GAGCCAATCCATTCCTTTG |
| 130 | AAAGGAATGGATTGGCTCT | 3691 | AGAGCCAATCCATTCCTTT |
| 131 | AAGGAATGGATTGGCTCTT | 3692 | AAGAGCCAATCCATTCCTT |
| 132 | AGGAATGGATTGGCTCTTC | 3693 | GAAGAGCCAATCCATTCCT |
| 133 | GGAATGGATTGGCTCTTCT | 3694 | AGAAGAGCCAATCCATTCC |
| 134 | GAATGGATTGGCTCTTCTT | 3695 | AAGAAGAGCCAATCCATTC |
| 135 | AATGGATTGGCTCTTCTTC | 3696 | GAAGAAGAGCCAATCCATT |
| 136 | ATGGATTGGCTCTTCTTCA | 3697 | TGAAGAAGAGCCAATCCAT |
| 137 | TGGATTGGCTCTTCTTCAG | 3698 | CTGAAGAAGAGCCAATCCA |
| 138 | GGATTGGCTCTTCTTCAGA | 3699 | TCTGAAGAAGAGCCAATCC |
| 139 | GATTGGCTCTTCTTCAGAA | 3700 | TTCTGAAGAAGAGCCAATC |
| 140 | ATTGGCTCTTCTTCAGAAA | 3701 | TTTCTGAAGAAGAGCCAAT |
| 141 | TTGGCTCTTCTTCAGAAAC | 3702 | GTTTCTGAAGAAGAGCCAA |
| 142 | TGGCTCTTCTTCAGAAACA | 3703 | TGTTTCTGAAGAAGAGCCA |
| 143 | GGCTCTTCTTCAGAAACAT | 3704 | ATGTTTCTGAAGAAGAGCC |
| 144 | GCTCTTCTTCAGAAACATT | 3705 | AATGTTTCTGAAGAAGAGC |
| 145 | CTCTTCTTCAGAAACATTT | 3706 | AAATGTTTCTGAAGAAGAG |
| 146 | TCTTCTTCAGAAACATTTG | 3707 | CAAATGTTTCTGAAGAAGA |
| 147 | CTTCTTCAGAAACATTTGC | 3708 | GCAAATGTTTCTGAAGAAG |
| 148 | TTCTTCAGAAACATTTGCC | 3709 | GGCAAATGTTTCTGAAGAA |
| 149 | TCTTCAGAAACATTTGCCT | 3710 | AGGCAAATGTTTCTGAAGA |
| 150 | CTTCAGAAACATTTGCCTT | 3711 | AAGGCAAATGTTTCTGAAG |
| 151 | TTCAGAAACATTTGCCTTT | 3712 | AAAGGCAAATGTTTCTGAA |
| 152 | TCAGAAACATTTGCCTTTT | 3713 | AAAAGGCAAATGTTTCTGA |
| 153 | CAGAAACATTTGCCTTTTG | 3714 | CAAAAGGCAAATGTTTCTG |
| 154 | AGAAACATTTGCCTTTTGA | 3715 | TCAAAAGGCAAATGTTTCT |
| 155 | GAAACATTTGCCTTTTGAT | 3716 | ATCAAAAGGCAAATGTTTC |
| 156 | AAACATTTGCCTTTTGATC | 3717 | GATCAAAAGGCAAATGTTT |
| 157 | AACATTTGCCTTTTGATCA | 3718 | TGATCAAAAGGCAAATGTT |
| 158 | ACATTTGCCTTTTGATCAT | 3719 | ATGATCAAAAGGCAAATGT |
| 159 | CATTTGCCTTTTGATCATT | 3720 | AATGATCAAAAGGCAAATG |
| 160 | ATTTGCCTTTTGATCATTC | 3721 | GAATGATCAAAAGGCAAAT |
| 161 | TTTGCCTTTTGATCATTCT | 3722 | AGAATGATCAAAAGGCAAA |
| 162 | TTGCCTTTTGATCATTCTA | 3723 | TAGAATGATCAAAAGGCAA |
| 163 | TGCCTTTTGATCATTCTAA | 3724 | TTAGAATGATCAAAAGGCA |
| 164 | GCCTTTTGATCATTCTAAT | 3725 | ATTAGAATGATCAAAAGGC |
| 165 | CCTTTTGATCATTCTAATG | 3726 | CATTAGAATGATCAAAAGG |
| 166 | CTTTTGATCATTCTAATGG | 3727 | CCATTAGAATGATCAAAAG |
| 167 | TTTTGATCATTCTAATGGT | 3728 | ACCATTAGAATGATCAAAA |
| 168 | TTTGATCATTCTAATGGTG | 3729 | CACCATTAGAATGATCAAA |
| 169 | TTGATCATTCTAATGGTGG | 3730 | CCACCATTAGAATGATCAA |
| 170 | TGATCATTCTAATGGTGGT | 3731 | ACCACCATTAGAATGATCA |
| 171 | GATCATTCTAATGGTGGTG | 3732 | CACCACCATTAGAATGATC |
| 172 | ATCATTCTAATGGTGGTGA | 3733 | TCACCACCATTAGAATGAT |
| 173 | TCATTCTAATGGTGGTGAT | 3734 | ATCACCACCATTAGAATGA |
| 174 | CATTCTAATGGTGGTGATG | 3735 | CATCACCACCATTAGAATG |
| 175 | ATTCTAATGGTGGTGATGG | 3736 | CCATCACCACCATTAGAAT |
| 176 | TTCTAATGGTGGTGATGGA | 3737 | TCCATCACCACCATTAGAA |
| 177 | TCTAATGGTGGTGATGGAA | 3738 | TTCCATCACCACCATTAGA |
| 178 | CTAATGGTGGTGATGGAAG | 3739 | CTTCCATCACCACCATTAG |
| 179 | TAATGGTGGTGATGGAAGT | 3740 | ACTTCCATCACCACCATTA |
| 180 | AATGGTGGTGATGGAAGTA | 3741 | TACTTCCATCACCACCATT |
| 181 | ATGGTGGTGATGGAAGTAA | 3742 | TTACTTCCATCACCACCAT |
| 182 | TGGTGGTGATGGAAGTAAA | 3743 | TTTACTTCCATCACCACCA |
| 183 | GGTGGTGATGGAAGTAAAC | 3744 | GTTTACTTCCATCACCACC |
| 184 | GTGGTGATGGAAGTAAACA | 3745 | TGTTTACTTCCATCACCAC |
| 185 | TGGTGATGGAAGTAAACAG | 3746 | CTGTTTACTTCCATCACCA |
| 186 | GGTGATGGAAGTAAACAGT | 3747 | ACTGTTTACTTCCATCACC |
| 187 | GTGATGGAAGTAAACAGTG | 3748 | CACTGTTTACTTCCATCAC |
| 188 | TGATGGAAGTAAACAGTGA | 3749 | TCACTGTTTACTTCCATCA |
| 189 | GATGGAAGTAAACAGTGAA | 3750 | TTCACTGTTTACTTCCATC |
| 190 | ATGGAAGTAAACAGTGAAT | 3751 | ATTCACTGTTTACTTCCAT |
| 191 | TGGAAGTAAACAGTGAATT | 3752 | AATTCACTGTTTACTTCCA |
| 192 | GGAAGTAAACAGTGAATTT | 3753 | AAATTCACTGTTTACTTCC |
| 193 | GAAGTAAACAGTGAATTTA | 3754 | TAAATTCACTGTTTACTTC |
| 194 | AAGTAAACAGTGAATTTAT | 3755 | ATAAATTCACTGTTTACTT |
| 195 | AGTAAACAGTGAATTTATT | 3756 | AATAAATTCACTGTTTACT |
| 196 | GTAAACAGTGAATTTATTG | 3757 | CAATAAATTCACTGTTTAC |
| 197 | TAAACAGTGAATTTATTGT | 3758 | ACAATAAATTCACTGTTTA |
| 198 | AAACAGTGAATTTATTGTT | 3759 | AACAATAAATTCACTGTTT |
| 199 | AACAGTGAATTTATTGTTG | 3760 | CAACAATAAATTCACTGTT |
| 200 | ACAGTGAATTTATTGTTGA | 3761 | TCAACAATAAATTCACTGT |
| 201 | CAGTGAATTTATTGTTGAG | 3762 | CTCAACAATAAATTCACTG |
| 202 | AGTGAATTTATTGTTGAGG | 3763 | CCTCAACAATAAATTCACT |
| 203 | GTGAATTTATTGTTGAGGT | 3764 | ACCTCAACAATAAATTCAC |
| 204 | TGAATTTATTGTTGAGGTG | 3765 | CACCTCAACAATAAATTCA |
| 205 | GAATTTATTGTTGAGGTGA | 3766 | TCACCTCAACAATAAATTC |
| 206 | AATTTATTGTTGAGGTGAA | 3767 | TTCACCTCAACAATAAATT |
| 207 | ATTTATTGTTGAGGTGAAG | 3768 | CTTCACCTCAACAATAAAT |
| 208 | TTTATTGTTGAGGTGAAGG | 3769 | CCTTCACCTCAACAATAAA |
| 209 | TTATTGTTGAGGTGAAGGA | 3770 | TCCTTCACCTCAACAATAA |
| 210 | TATTGTTGAGGTGAAGGAA | 3771 | TTCCTTCACCTCAACAATA |
| 211 | ATTGTTGAGGTGAAGGAAT | 3772 | ATTCCTTCACCTCAACAAT |
| 212 | TTGTTGAGGTGAAGGAATT | 3773 | AATTCCTTCACCTCAACAA |
| 213 | TGTTGAGGTGAAGGAATTT | 3774 | AAATTCCTTCACCTCAACA |
| 214 | GTTGAGGTGAAGGAATTTG | 3775 | CAAATTCCTTCACCTCAAC |
| 215 | TTGAGGTGAAGGAATTTGA | 3776 | TCAAATTCCTTCACCTCAA |
| 216 | TGAGGTGAAGGAATTTGAC | 3777 | GTCAAATTCCTTCACCTCA |
| 217 | GAGGTGAAGGAATTTGACA | 3778 | TGTCAAATTCCTTCACCTC |
| 218 | AGGTGAAGGAATTTGACAT | 3779 | ATGTCAAATTCCTTCACCT |
| 219 | GGTGAAGGAATTTGACATT | 3780 | AATGTCAAATTCCTTCACC |
| 220 | GTGAAGGAATTTGACATTG | 3781 | CAATGTCAAATTCCTTCAC |
| 221 | TGAAGGAATTTGACATTGA | 3782 | TCAATGTCAAATTCCTTCA |
| 222 | GAAGGAATTTGACATTGAA | 3783 | TTCAATGTCAAATTCCTTC |
| 223 | AAGGAATTTGACATTGAAA | 3784 | TTTCAATGTCAAATTCCTT |
| 224 | AGGAATTTGACATTGAAAA | 3785 | TTTTCAATGTCAAATTCCT |
| 225 | GGAATTTGACATTGAAAAT | 3786 | ATTTTCAATGTCAAATTCC |
| 226 | GAATTTGACATTGAAAATG | 3787 | CATTTTCAATGTCAAATTC |
| 227 | AATTTGACATTGAAAATGG | 3788 | CCATTTTCAATGTCAAATT |
| 228 | ATTTGACATTGAAAATGGC | 3789 | GCCATTTTCAATGTCAAAT |
| 229 | TTTGACATTGAAAATGGCA | 3790 | TGCCATTTTCAATGTCAAA |
| 230 | TTGACATTGAAAATGGCAC | 3791 | GTGCCATTTTCAATGTCAA |
| 231 | TGACATTGAAAATGGCACT | 3792 | AGTGCCATTTTCAATGTCA |
| 232 | GACATTGAAAATGGCACTA | 3793 | TAGTGCCATTTTCAATGTC |
| 233 | ACATTGAAAATGGCACTAC | 3794 | GTAGTGCCATTTTCAATGT |
| 234 | CATTGAAAATGGCACTACA | 3795 | TGTAGTGCCATTTTCAATG |
| 235 | ATTGAAAATGGCACTACAA | 3796 | TTGTAGTGCCATTTTCAAT |
| 236 | TTGAAAATGGCACTACAAA | 3797 | TTTGTAGTGCCATTTTCAA |
| 237 | TGAAAATGGCACTACAAAA | 3798 | TTTTGTAGTGCCATTTTCA |
| 238 | GAAAATGGCACTACAAAAT | 3799 | ATTTTGTAGTGCCATTTTC |
| 239 | AAAATGGCACTACAAAATG | 3800 | CATTTTGTAGTGCCATTTT |
| 240 | AAATGGCACTACAAAATGG | 3801 | CCATTTTGTAGTGCCATTT |
| 241 | AATGGCACTACAAAATGGC | 3802 | GCCATTTTGTAGTGCCATT |
| 242 | ATGGCACTACAAAATGGCA | 3803 | TGCCATTTTGTAGTGCCAT |
| 243 | TGGCACTACAAAATGGCAA | 3804 | TTGCCATTTTGTAGTGCCA |
| 244 | GGCACTACAAAATGGCAAA | 3805 | TTTGCCATTTTGTAGTGCC |
| 245 | GCACTACAAAATGGCAAAC | 3806 | GTTTGCCATTTTGTAGTGC |
| 246 | CACTACAAAATGGCAAACA | 3807 | TGTTTGCCATTTTGTAGTG |
| 247 | ACTACAAAATGGCAAACAG | 3808 | CTGTTTGCCATTTTGTAGT |
| 248 | CTACAAAATGGCAAACAGT | 3809 | ACTGTTTGCCATTTTGTAG |
| 249 | TACAAAATGGCAAACAGTC | 3810 | GACTGTTTGCCATTTTGTA |
| 250 | ACAAAATGGCAAACAGTCA | 3811 | TGACTGTTTGCCATTTTGT |
| 251 | CAAAATGGCAAACAGTCAG | 3812 | CTGACTGTTTGCCATTTTG |
| 252 | AAAATGGCAAACAGTCAGA | 3813 | TCTGACTGTTTGCCATTTT |
| 253 | AAATGGCAAACAGTCAGAA | 3814 | TTCTGACTGTTTGCCATTT |
| 254 | AATGGCAAACAGTCAGAAG | 3815 | CTTCTGACTGTTTGCCATT |
| 255 | ATGGCAAACAGTCAGAAGA | 3816 | TCTTCTGACTGTTTGCCAT |
| 256 | TGGCAAACAGTCAGAAGAC | 3817 | GTCTTCTGACTGTTTGCCA |
| 257 | GGCAAACAGTCAGAAGACA | 3818 | TGTCTTCTGACTGTTTGCC |
| 258 | GCAAACAGTCAGAAGACAA | 3819 | TTGTCTTCTGACTGTTTGC |
| 259 | CAAACAGTCAGAAGACAAA | 3820 | TTTGTCTTCTGACTGTTTG |
| 260 | AAACAGTCAGAAGACAAAA | 3821 | TTTTGTCTTCTGACTGTTT |
| 261 | AACAGTCAGAAGACAAAAG | 3822 | CTTTTGTCTTCTGACTGTT |
| 262 | ACAGTCAGAAGACAAAAGC | 3823 | GCTTTTGTCTTCTGACTGT |
| 263 | CAGTCAGAAGACAAAAGCG | 3824 | CGCTTTTGTCTTCTGACTG |
| 264 | AGTCAGAAGACAAAAGCGG | 3825 | CCGCTTTTGTCTTCTGACT |
| 265 | GTCAGAAGACAAAAGCGGG | 3826 | CCCGCTTTTGTCTTCTGAC |
| 266 | TCAGAAGACAAAAGCGGGA | 3827 | TCCCGCTTTTGTCTTCTGA |
| 267 | CAGAAGACAAAAGCGGGAG | 3828 | CTCCCGCTTTTGTCTTCTG |
| 268 | AGAAGACAAAAGCGGGAGT | 3829 | ACTCCCGCTTTTGTCTTCT |
| 269 | GAAGACAAAAGCGGGAGTG | 3830 | CACTCCCGCTTTTGTCTTC |
| 270 | AAGACAAAAGCGGGAGTGG | 3831 | CCACTCCCGCTTTTGTCTT |
| 271 | AGACAAAAGCGGGAGTGGA | 3832 | TCCACTCCCGCTTTTGTCT |
| 272 | GACAAAAGCGGGAGTGGAT | 3833 | ATCCACTCCCGCTTTTGTC |
| 273 | ACAAAAGCGGGAGTGGATC | 3834 | GATCCAGTCCCGCTTTTGT |
| 274 | CAAAAGCGGGAGTGGATCA | 3835 | TGATCCACTCCCGCTTTTG |
| 275 | AAAAGCGGGAGTGGATCAA | 3836 | TTGATCCACTCCCGCTTTT |
| 276 | AAAGCGGGAGTGGATCAAG | 3837 | CTTGATCCACTCCCGCTTT |
| 277 | AAGCGGGAGTGGATCAAGT | 3838 | ACTTGATCCACTCCCGCTT |
| 278 | AGCGGGAGTGGATCAAGTT | 3839 | AACTTGATCCACTCCCGCT |
| 279 | GCGGGAGTGGATCAAGTTT | 3840 | AAACTTGATCCACTCCCGC |
| 280 | CGGGAGTGGATCAAGTTTG | 3841 | CAAACTTGATCCACTCCCG |
| 281 | GGGAGTGGATCAAGTTTGC | 3842 | GCAAACTTGATCCACTCCC |
| 282 | GGAGTGGATCAAGTTTGCC | 3843 | GGCAAACTTGATCCACTCC |
| 283 | GAGTGGATCAAGTTTGCCG | 3844 | CGGCAAACTTGATCCACTC |
| 284 | AGTGGATCAAGTTTGCCGC | 3845 | GCGGCAAACTTGATCCACT |
| 285 | GTGGATCAAGTTTGCCGCA | 3846 | TGCGGCAAACTTGATCCAC |
| 286 | TGGATCAAGTTTGCCGCAG | 3847 | CTGCGGCAAACTTGATCCA |
| 287 | GGATCAAGTTTGCCGCAGC | 3848 | GCTGCGGCAAACTTGATCC |
| 288 | GATCAAGTTTGCCGCAGCC | 3849 | GGCTGCGGCAAACTTGATC |
| 289 | ATCAAGTTTGCCGCAGCCT | 3850 | AGGCTGCGGCAAACTTGAT |
| 290 | TCAAGTTTGCCGCAGCCTG | 3851 | CAGGCTGCGGCAAACTTGA |
| 291 | CAAGTTTGCCGCAGCCTGT | 3852 | ACAGGCTGCGGCAAACTTG |
| 292 | AAGTTTGCCGCAGCCTGTC | 3853 | GACAGGCTGCGGCAAACTT |
| 293 | AGTTTGCCGCAGCCTGTCG | 3854 | CGACAGGCTGCGGCAAACT |
| 294 | GTTTGCCGCAGCCTGTCGA | 3855 | TCGACAGGCTGCGGCAAAC |
| 295 | TTTGCCGCAGCCTGTCGAG | 3856 | CTCGACAGGCTGCGGCAAA |
| 296 | TTGCCGCAGCCTGTCGAGA | 3857 | TCTCGACAGGCTGCGGCAA |
| 297 | TGCCGCAGCCTGTCGAGAA | 3858 | TTCTCGACAGGCTGCGGCA |
| 298 | GCCGCAGCCTGTCGAGAAG | 3859 | CTTCTCGACAGGCTGCGGC |
| 299 | CCGCAGCCTGTCGAGAAGG | 3860 | CCTTCTCGACAGGCTGCGG |
| 300 | CGCAGCCTGTCGAGAAGGA | 3861 | TCCTTCTCGACAGGCTGCG |
| 301 | GCAGCCTGTCGAGAAGGAG | 3862 | CTCCTTCTCGACAGGCTGC |
| 302 | CAGCCTGTCGAGAAGGAGA | 3863 | TCTCCTTCTCGACAGGCTG |
| 303 | AGCCTGTCGAGAAGGAGAG | 3864 | CTCTCCTTCTCGACAGGCT |
| 304 | GCCTGTCGAGAAGGAGAGG | 3865 | CCTCTCCTTCTCGACAGGC |
| 305 | CCTGTCGAGAAGGAGAGGA | 3866 | TCCTCTCCTTCTCGACAGG |
| 306 | CTGTCGAGAAGGAGAGGAC | 3867 | GTCCTCTCCTTCTCGACAG |
| 307 | TGTCGAGAAGGAGAGGACA | 3868 | TGTCCTCTCCTTCTCGACA |
| 308 | GTCGAGAAGGAGAGGACAA | 3869 | TTGTCCTCTCCTTCTCGAC |
| 309 | TCGAGAAGGAGAGGACAAC | 3870 | GTTGTCCTCTCCTTCTCGA |
| 310 | CGAGAAGGAGAGGACAACT | 3871 | AGTTGTCCTCTCCTTCTCG |
| 311 | GAGAAGGAGAGGACAACTC | 3872 | GAGTTGTCCTCTCCTTCTC |
| 312 | AGAAGGAGAGGACAACTCG | 3873 | CGAGTTGTCCTCTCCTTCT |
| 313 | GAAGGAGAGGACAACTCGA | 3874 | TCGAGTTGTCCTCTCCTTC |
| 314 | AAGGAGAGGACAACTCGAA | 3875 | TTCGAGTTGTCCTCTCCTT |
| 315 | AGGAGAGGACAACTCGAAG | 3876 | CTTCGAGTTGTCCTCTCCT |
| 316 | GGAGAGGACAACTCGAAGA | 3877 | TCTTCGAGTTGTCCTCTCC |
| 317 | GAGAGGACAACTCGAAGAG | 3878 | CTCTTCGAGTTGTCCTCTC |
| 318 | AGAGGACAACTCGAAGAGG | 3879 | CCTCTTCGAGTTGTCCTCT |
| 319 | GAGGACAACTCGAAGAGGA | 3880 | TCCTCTTCGAGTTGTCCTC |
| 320 | AGGACAACTCGAAGAGGAA | 3881 | TTCCTCTTCGAGTTGTCCT |
| 321 | GGACAACTCGAAGAGGAAC | 3882 | GTTCCTCTTCGAGTTGTCC |
| 322 | GACAACTCGAAGAGGAACC | 3883 | GGTTCCTCTTCGAGTTGTC |
| 323 | ACAACTCGAAGAGGAACCC | 3884 | GGGTTCCTCTTCGAGTTGT |
| 324 | CAACTCGAAGAGGAACCCC | 3885 | GGGGTTCCTCTTCGAGTTG |
| 325 | AACTCGAAGAGGAACCCCA | 3886 | TGGGGTTCCTCTTCGAGTT |
| 326 | ACTCGAAGAGGAACCCCAT | 3887 | ATGGGGTTCCTCTTCGAGT |
| 327 | CTCGAAGAGGAACCCCATT | 3888 | AATGGGGTTCCTCTTCGAG |
| 328 | TCGAAGAGGAACCCCATTG | 3889 | CAATGGGGTTCCTCTTCGA |
| 329 | CGAAGAGGAACCCCATTGC | 3890 | GCAATGGGGTTCCTCTTCG |
| 330 | GAAGAGGAACCCCATTGCC | 3891 | GGCAATGGGGTTCCTCTTC |
| 331 | AAGAGGAACCCCATTGCCA | 3892 | TGGCAATGGGGTTCCTCTT |
| 332 | AGAGGAACCCCATTGCCAA | 3893 | TTGGCAATGGGGTTCCTCT |
| 333 | GAGGAACCCCATTGCCAAA | 3894 | TTTGGCAATGGGGTTCCTC |
| 334 | AGGAACCCCATTGCCAAAA | 3895 | TTTTGGCAATGGGGTTCCT |
| 335 | GGAACCCCATTGCCAAAAT | 3896 | ATTTTGGCAATGGGGTTCC |
| 336 | GAACCCCATTGCCAAAATT | 3897 | AATTTTGGCAATGGGGTTC |
| 337 | AACCCCATTGCCAAAATTC | 3898 | GAATTTTGGCAATGGGGTT |
| 338 | ACCCCATTGCCAAAATTCG | 3899 | CGAATTTTGGCAATGGGGT |
| 339 | CCCCATTGCCAAAATTCGA | 3900 | TCGAATTTTGGCAATGGGG |
| 340 | CCCATTGCCAAAATTCGAT | 3901 | ATCGAATTTTGGCAATGGG |
| 341 | CCATTGCCAAAATTCGATC | 3902 | GATCGAATTTTGGCAATGG |
| 342 | CATTGCCAAAATTCGATCA | 3903 | TGATCGAATTTTGGCAATG |
| 343 | ATTGCCAAAATTCGATCAG | 3904 | CTGATCGAATTTTGGCAAT |
| 344 | TTGCCAAAATTCGATCAGA | 3905 | TCTGATCGAATTTTGGCAA |
| 345 | TGCCAAAATTCGATCAGAC | 3906 | GTCTGATCGAATTTTGGCA |
| 346 | GCCAAAATTCGATCAGACT | 3907 | AGTCTGATCGAATTTTGGC |
| 347 | CCAAAATTCGATCAGACTG | 3908 | CAGTCTGATCGAATTTTGG |
| 348 | CAAAATTCGATCAGACTGC | 3909 | GCAGTCTGATCGAATTTTG |
| 349 | AAAATTCGATCAGACTGCG | 3910 | CGCAGTCTGATCGAATTTT |
| 350 | AAATTCGATCAGACTGCGA | 3911 | TCGCAGTCTGATCGAATTT |
| 351 | AATTCGATCAGACTGCGAA | 3912 | TTCGCAGTCTGATCGAATT |
| 352 | ATTCGATCAGACTGCGAAT | 3913 | ATTCGCAGTCTGATCGAAT |
| 353 | TTCGATCAGACTGCGAATC | 3914 | GATTCGCAGTCTGATCGAA |
| 354 | TCGATCAGACTGCGAATCG | 3915 | CGATTCGCAGTCTGATCGA |
| 355 | CGATCAGACTGCGAATCGA | 3916 | TCGATTCGCAGTCTGATCG |
| 356 | GATCAGACTGCGAATCGAA | 3917 | TTCGATTCGCAGTCTGATC |
| 357 | ATCAGACTGCGAATCGAAC | 3918 | GTTCGATTCGCAGTCTGAT |
| 358 | TCAGACTGCGAATCGAACC | 3919 | GGTTCGATTCGCAGTCTGA |
| 359 | CAGACTGCGAATCGAACCA | 3920 | TGGTTCGATTCGCAGTCTG |
| 360 | AGACTGCGAATCGAACCAG | 3921 | CTGGTTCGATTCGCAGTCT |
| 361 | GACTGCGAATCGAACCAGA | 3922 | TCTGGTTCGATTCGCAGTC |
| 362 | ACTGCGAATCGAACCAGAA | 3923 | TTCTGGTTCGATTCGCAGT |
| 363 | CTGCGAATCGAACCAGAAG | 3924 | CTTCTGGTTCGATTCGCAG |
| 364 | TGCGAATCGAACCAGAAGA | 3925 | TCTTCTGGTTCGATTCGCA |
| 365 | GCGAATCGAACCAGAAGAT | 3926 | ATCTTCTGGTTCGATTCGC |
| 366 | CGAATCGAACCAGAAGATA | 3927 | TATCTTCTGGTTCGATTCG |
| 367 | GAATCGAACCAGAAGATAA | 3928 | TTATCTTCTGGTTCGATTC |
| 368 | AATCGAACCAGAAGATAAC | 3929 | GTTATCTTCTGGTTCGATT |
| 369 | ATCGAACCAGAAGATAACA | 3930 | TGTTATCTTCTGGTTCGAT |
| 370 | TCGAACCAGAAGATAACAT | 3931 | ATGTTATCTTCTGGTTCGA |
| 371 | CGAACCAGAAGATAACATA | 3932 | TATGTTATCTTCTGGTTCG |
| 372 | GAACCAGAAGATAACATAC | 3933 | GTATGTTATCTTCTGGTTC |
| 373 | AACCAGAAGATAACATACC | 3934 | GGTATGTTATCTTCTGGTT |
| 374 | ACCAGAAGATAACATACCG | 3935 | CGGTATGTTATCTTCTGGT |
| 375 | CCAGAAGATAACATACCGG | 3936 | CCGGTATGTTATCTTCTGG |
| 376 | CAGAAGATAACATACCGGA | 3937 | TCCGGTATGTTATCTTCTG |
| 377 | AGAAGATAACATACCGGAT | 3938 | ATCCGGTATGTTATCTTCT |
| 378 | GAAGATAACATACCGGATT | 3939 | AATCCGGTATGTTATCTTC |
| 379 | AAGATAACATACCGGATTT | 3940 | AAATCCGGTATGTTATCTT |
| 380 | AGATAACATACCGGATTTC | 3941 | GAAATCCGGTATGTTATCT |
| 381 | GATAACATACCGGATTTCT | 3942 | AGAAATCCGGTATGTTATC |
| 382 | ATAACATACCGGATTTCTG | 3943 | CAGAAATCCGGTATGTTAT |
| 383 | TAACATACCGGATTTCTGG | 3944 | CCAGAAATCCGGTATGTTA |
| 384 | AACATACCGGATTTCTGGA | 3945 | TCCAGAAATCCGGTATGTT |
| 385 | ACATACCGGATTTCTGGAG | 3946 | CTCCAGAAATCCGGTATGT |
| 386 | CATACCGGATTTCTGGAGT | 3947 | ACTCCAGAAATCCGGTATG |
| 387 | ATACCGGATTTCTGGAGTA | 3948 | TACTCCAGAAATCCGGTAT |
| 388 | TACCGGATTTCTGGAGTAG | 3949 | CTACTCCAGAAATCCGGTA |
| 389 | ACCGGATTTCTGGAGTAGG | 3950 | CCTACTCCAGAAATCCGGT |
| 390 | CCGGATTTCTGGAGTAGGG | 3951 | CCCTACTCCAGAAATCCGG |
| 391 | CGGATTTCTGGAGTAGGGA | 3952 | TCCCTACTCCAGAAATCCG |
| 392 | GGATTTCTGGAGTAGGGAT | 3953 | ATCCCTACTCCAGAAATCC |
| 393 | GATTTCTGGAGTAGGGATT | 3954 | AATCCCTACTCCAGAAATC |
| 394 | ATTTCTGGAGTAGGGATTG | 3955 | CAATCCCTACTCCAGAAAT |
| 395 | TTTCTGGAGTAGGGATTGA | 3956 | TCAATCCCTACTCCAGAAA |
| 396 | TTCTGGAGTAGGGATTGAT | 3957 | ATCAATCCCTACTCCAGAA |
| 397 | TCTGGAGTAGGGATTGATC | 3958 | GATCAATCCCTACTCCAGA |
| 398 | CTGGAGTAGGGATTGATCG | 3959 | CGATCAATCCCTACTCCAG |
| 399 | TGGAGTAGGGATTGATCGA | 3960 | TCGATCAATCCCTACTCCA |
| 400 | GGAGTAGGGATTGATCGAC | 3961 | GTCGATCAATCCCTACTCC |
| 401 | GAGTAGGGATTGATCGACC | 3962 | GGTCGATCAATCCCTACTC |
| 402 | AGTAGGGATTGATCGACCA | 3963 | TGGTCGATCAATCCCTACT |
| 403 | GTAGGGATTGATCGACCAC | 3964 | GTGGTCGATCAATCCCTAC |
| 404 | TAGGGATTGATCGACCACC | 3965 | GGTGGTCGATCAATCCCTA |
| 405 | AGGGATTGATCGACCACCA | 3966 | TGGTGGTCGATCAATCCCT |
| 406 | GGGATTGATCGACCACCAT | 3967 | ATGGTGGTCGATCAATCCC |
| 407 | GGATTGATCGACCACCATA | 3968 | TATGGTGGTCGATCAATCC |
| 408 | GATTGATCGACCACCATAT | 3969 | ATATGGTGGTCGATCAATC |
| 409 | ATTGATCGACCACCATATG | 3970 | CATATGGTGGTCGATCAAT |
| 410 | TTGATCGACCACCATATGG | 3971 | CCATATGGTGGTCGATCAA |
| 411 | TGATCGACCACCATATGGG | 3972 | CCCATATGGTGGTCGATCA |
| 412 | GATCGACCACCATATGGGG | 3973 | CCCCATATGGTGGTCGATC |
| 413 | ATCGACCACCATATGGGGT | 3974 | ACCCCATATGGTGGTCGAT |
| 414 | TCGACCACCATATGGGGTA | 3975 | TACCCCATATGGTGGTCGA |
| 415 | CGACCACCATATGGGGTAT | 3976 | ATACCCCATATGGTGGTCG |
| 416 | GACCACCATATGGGGTATT | 3977 | AATACCCCATATGGTGGTC |
| 417 | ACCACCATATGGGGTATTC | 3978 | GAATACCCCATATGGTGGT |
| 418 | CCACCATATGGGGTATTCA | 3979 | TGAATACCCCATATGGTGG |
| 419 | CACCATATGGGGTATTCAC | 3980 | GTGAATACCCCATATGGTG |
| 420 | ACCATATGGGGTATTCACC | 3981 | GGTGAATACCCCATATGGT |
| 421 | CCATATGGGGTATTCACCA | 3982 | TGGTGAATACCCCATATGG |
| 422 | CATATGGGGTATTCACCAT | 3983 | ATGGTGAATACCCCATATG |
| 423 | ATATGGGGTATTCACCATT | 3984 | AATGGTGAATACCCCATAT |
| 424 | TATGGGGTATTCACCATTA | 3985 | TAATGGTGAATACCCCATA |
| 425 | ATGGGGTATTCACCATTAA | 3986 | TTAATGGTGAATACCCCAT |
| 426 | TGGGGTATTCACCATTAAT | 3987 | ATTAATGGTGAATACCCCA |
| 427 | GGGGTATTCACCATTAATC | 3988 | GATTAATGGTGAATACCCC |
| 428 | GGGTATTCACCATTAATCC | 3989 | GGATTAATGGTGAATACCC |
| 429 | GGTATTCACCATTAATCCT | 3990 | AGGATTAATGGTGAATACC |
| 430 | GTATTCACCATTAATCCTC | 3991 | GAGGATTAATGGTGAATAC |
| 431 | TATTCACCATTAATCCTCG | 3992 | CGAGGATTAATGGTGAATA |
| 432 | ATTCACCATTAATCCTCGC | 3993 | GCGAGGATTAATGGTGAAT |
| 433 | TTCACCATTAATCCTCGCA | 3994 | TGCGAGGATTAATGGTGAA |
| 434 | TCACCATTAATCCTCGCAC | 3995 | GTGCGAGGATTAATGGTGA |
| 435 | CACCATTAATCCTCGCACT | 3996 | AGTGCGAGGATTAATGGTG |
| 436 | ACCATTAATCCTCGCACTG | 3997 | CAGTGCGAGGATTAATGGT |
| 437 | CCATTAATCCTCGCACTGG | 3998 | CCAGTGCGAGGATTAATGG |
| 438 | CATTAATCCTCGCACTGGG | 3999 | CCCAGTGCGAGGATTAATG |
| 439 | ATTAATCCTCGCACTGGGG | 4000 | CCCCAGTGCGAGGATTAAT |
| 440 | TTAATCCTCGCACTGGGGA | 4001 | TCCCCAGTGCGAGGATTAA |
| 441 | TAATCCTCGCACTGGGGAA | 4002 | TTCCCCAGTGCGAGGATTA |
| 442 | AATCCTCGCACTGGGGAAA | 4003 | TTTCCCCAGTGCGAGGATT |
| 443 | ATCCTCGCACTGGGGAAAT | 4004 | ATTTCCCCAGTGCGAGGAT |
| 444 | TCCTCGCACTGGGGAAATT | 4005 | AATTTCCCCAGTGCGAGGA |
| 445 | CCTCGCACTGGGGAAATTA | 4006 | TAATTTCCCCAGTGCGAGG |
| 446 | CTCGCACTGGGGAAATTAA | 4007 | TTAATTTCCCCAGTGCGAG |
| 447 | TCGCACTGGGGAAATTAAC | 4008 | GTTAATTTCCCCAGTGCGA |
| 448 | CGCACTGGGGAAATTAACA | 4009 | TGTTAATTTCCCCAGTGCG |
| 449 | GCACTGGGGAAATTAACAT | 4010 | ATGTTAATTTCCCCAGTGC |
| 450 | CACTGGGGAAATTAACATC | 4011 | GATGTTAATTTCCCCAGTG |
| 451 | ACTGGGGAAATTAACATCA | 4012 | TGATGTTAATTTCCCCAGT |
| 452 | CTGGGGAAATTAACATCAC | 4013 | GTGATGTTAATTTCCCCAG |
| 453 | TGGGGAAATTAACATCACT | 4014 | AGTGATGTTAATTTCCCCA |
| 454 | GGGGAAATTAACATCACTT | 4015 | AAGTGATGTTAATTTCCCC |
| 455 | GGGAAATTAACATCACTTC | 4016 | GAAGTGATGTTAATTTCCC |
| 456 | GGAAATTAACATCACTTCA | 4017 | TGAAGTGATGTTAATTTCC |
| 457 | GAAATTAACATCACTTCAG | 4018 | CTGAAGTGATGTTAATTTC |
| 458 | AAATTAACATCACTTCAGT | 4019 | ACTGAAGTGATGTTAATTT |
| 459 | AATTAACATCACTTCAGTG | 4020 | CACTGAAGTGATGTTAATT |
| 460 | ATTAACATCACTTCAGTGG | 4021 | CCACTGAAGTGATGTTAAT |
| 461 | TTAACATCACTTCAGTGGT | 4022 | ACCACTGAAGTGATGTTAA |
| 462 | TAACATCACTTCAGTGGTA | 4023 | TACCACTGAAGTGATGTTA |
| 463 | AACATCACTTCAGTGGTAG | 4024 | CTACCACTGAAGTGATGTT |
| 464 | ACATCACTTCAGTGGTAGA | 4025 | TCTACCACTGAAGTGATGT |
| 465 | CATCACTTCAGTGGTAGAC | 4026 | GTCTACCACTGAAGTGATG |
| 466 | ATCACTTCAGTGGTAGACA | 4027 | TGTCTACCACTGAAGTGAT |
| 467 | TCACTTCAGTGGTAGACAG | 4028 | CTGTCTACCACTGAAGTGA |
| 468 | CACTTCAGTGGTAGACAGA | 4029 | TCTGTCTACCACTGAAGTG |
| 469 | ACTTCAGTGGTAGACAGAG | 4030 | CTCTGTCTACCACTGAAGT |
| 470 | CTTCAGTGGTAGACAGAGA | 4031 | TCTCTGTCTACCACTGAAG |
| 471 | TTCAGTGGTAGACAGAGAA | 4032 | TTCTCTGTCTACCACTGAA |
| 472 | TCAGTGGTAGACAGAGAAA | 4033 | TTTCTCTGTCTACCACTGA |
| 473 | CAGTGGTAGACAGAGAAAT | 4034 | ATTTCTCTGTCTACCACTG |
| 474 | AGTGGTAGACAGAGAAATA | 4035 | TATTTCTCTGTCTACCACT |
| 475 | GTGGTAGACAGAGAAATAA | 4036 | TTATTTCTCTGTCTACCAC |
| 476 | TGGTAGACAGAGAAATAAC | 4037 | GTTATTTCTCTGTCTACCA |
| 477 | GGTAGACAGAGAAATAACT | 4038 | AGTTATTTCTCTGTCTACC |
| 478 | GTAGACAGAGAAATAACTC | 4039 | GAGTTATTTCTCTGTCTAC |
| 479 | TAGACAGAGAAATAACTCC | 4040 | GGAGTTATTTCTCTGTCTA |
| 480 | AGACAGAGAAATAACTCCA | 4041 | TGGAGTTATTTCTCTGTCT |
| 481 | GACAGAGAAATAACTCCAC | 4042 | GTGGAGTTATTTCTCTGTC |
| 482 | ACAGAGAAATAACTCCACT | 4043 | AGTGGAGTTATTTCTCTGT |
| 483 | CAGAGAAATAACTCCACTT | 4044 | AAGTGGAGTTATTTCTCTG |
| 484 | AGAGAAATAACTCCACTTT | 4045 | AAAGTGGAGTTATTTCTCT |
| 485 | GAGAAATAACTCCACTTTT | 4046 | AAAAGTGGAGTTATTTCTC |
| 486 | AGAAATAACTCCACTTTTC | 4047 | GAAAAGTGGAGTTATTTCT |
| 487 | GAAATAACTCCACTTTTCT | 4048 | AGAAAAGTGGAGTTATTTC |
| 488 | AAATAACTCCACTTTTCTT | 4049 | AAGAAAAGTGGAGTTATTT |
| 489 | AATAACTCCACTTTTCTTG | 4050 | CAAGAAAAGTGGAGTTATT |
| 490 | ATAACTCCACTTTTCTTGA | 4051 | TCAAGAAAAGTGGAGTTAT |
| 491 | TAACTCCACTTTTCTTGAT | 4052 | ATCAAGAAAAGTGGAGTTA |
| 492 | AACTCCACTTTTCTTGATC | 4053 | GATCAAGAAAAGTGGAGTT |
| 493 | ACTCCAGTTTTCTTGATCT | 4054 | AGATCAAGAAAAGTGGAGT |
| 494 | CTCCACTTTTCTTGATCTA | 4055 | TAGATCAAGAAAAGTGGAG |
| 495 | TCCACTTTTCTTGATCTAT | 4056 | ATAGATCAAGAAAAGTGGA |
| 496 | CCACTTTTCTTGATCTATT | 4057 | AATAGATCAAGAAAAGTGG |
| 497 | CACTTTTCTTGATCTATTG | 4058 | CAATAGATCAAGAAAAGTG |
| 498 | ACTTTTCTTGATCTATTGC | 4059 | GCAATAGATCAAGAAAAGT |
| 499 | CTTTTCTTGATCTATTGCC | 4060 | GGCAATAGATCAAGAAAAG |
| 500 | TTTTCTTGATCTATTGCCG | 4061 | CGGCAATAGATCAAGAAAA |
| 501 | TTTCTTGATCTATTGCCGG | 4062 | CCGGCAATAGATCAAGAAA |
| 502 | TTCTTGATCTATTGCCGGG | 4063 | CCCGGCAATAGATCAAGAA |
| 503 | TCTTGATCTATTGCCGGGC | 4064 | GCCCGGCAATAGATCAAGA |
| 504 | CTTGATCTATTGCCGGGCT | 4065 | AGCCCGGCAATAGATCAAG |
| 505 | TTGATCTATTGCCGGGCTC | 4066 | GAGCCCGGCAATAGATCAA |
| 506 | TGATCTATTGCCGGGCTCT | 4067 | AGAGCCCGGCAATAGATCA |
| 507 | GATCTATTGCCGGGCTCTG | 4068 | CAGAGCCCGGCAATAGATC |
| 508 | ATCTATTGCCGGGCTCTGA | 4069 | TCAGAGCCCGGCAATAGAT |
| 509 | TCTATTGCCGGGCTCTGAA | 4070 | TTCAGAGCCCGGCAATAGA |
| 510 | CTATTGCCGGGCTCTGAAT | 4071 | ATTCAGAGCCCGGCAATAG |
| 511 | TATTGCCGGGCTCTGAATT | 4072 | AATTCAGAGCCCGGCAATA |
| 512 | ATTGCCGGGCTCTGAATTC | 4073 | GAATTCAGAGCCCGGCAAT |
| 513 | TTGCCGGGCTCTGAATTCA | 4074 | TGAATTCAGAGCCCGGCAA |
| 514 | TGCCGGGCTCTGAATTCAC | 4075 | GTGAATTCAGAGCCCGGCA |
| 515 | GCCGGGCTCTGAATTCACG | 4076 | CGTGAATTCAGAGCCCGGC |
| 516 | CCGGGCTCTGAATTCACGG | 4077 | CCGTGAATTCAGAGCCCGG |
| 517 | CGGGCTCTGAATTCACGGG | 4078 | CCCGTGAATTCAGAGCCCG |
| 518 | GGGCTCTGAATTCACGGGG | 4079 | CCCCGTGAATTCAGAGCCC |
| 519 | GGCTCTGAATTCACGGGGT | 4080 | ACCCCGTGAATTCAGAGCC |
| 520 | GCTCTGAATTCACGGGGTG | 4081 | CACCCCGTGAATTCAGAGC |
| 521 | CTCTGAATTCACGGGGTGA | 4082 | TCACCCCGTGAATTCAGAG |
| 522 | TCTGAATTCACGGGGTGAA | 4083 | TTCACCCCGTGAATTCAGA |
| 523 | CTGAATTCACGGGGTGAAG | 4084 | CTTCACCCCGTGAATTCAG |
| 524 | TGAATTCACGGGGTGAAGA | 4085 | TCTTCACCCCGTGAATTCA |
| 525 | GAATTCACGGGGTGAAGAT | 4086 | ATCTTCACCCCGTGAATTC |
| 526 | AATTCACGGGGTGAAGATT | 4087 | AATCTTCACCCCGTGAATT |
| 527 | ATTCACGGGGTGAAGATTT | 4088 | AAATCTTCACCCCGTGAAT |
| 528 | TTCACGGGGTGAAGATTTA | 4089 | TAAATCTTCACCCCGTGAA |
| 529 | TCACGGGGTGAAGATTTAG | 4090 | CTAAATCTTCACCCCGTGA |
| 530 | CACGGGGTGAAGATTTAGA | 4091 | TCTAAATCTTCACCCCGTG |
| 531 | ACGGGGTGAAGATTTAGAA | 4092 | TTCTAAATCTTCACCCCGT |
| 532 | CGGGGTGAAGATTTAGAAA | 4093 | TTTCTAAATCTTCACCCCG |
| 533 | GGGGTGAAGATTTAGAAAG | 4094 | CTTTCTAAATCTTCACCCC |
| 534 | GGGTGAAGATTTAGAAAGG | 4095 | CCTTTCTAAATCTTCACCC |
| 535 | GGTGAAGATTTAGAAAGGC | 4096 | GCCTTTCTAAATCTTCACC |
| 536 | GTGAAGATTTAGAAAGGCC | 4097 | GGCCTTTCTAAATCTTCAC |
| 537 | TGAAGATTTAGAAAGGCCT | 4098 | AGGCCTTTCTAAATCTTCA |
| 538 | GAAGATTTAGAAAGGCCTC | 4099 | GAGGCCTTTCTAAATCTTC |
| 539 | AAGATTTAGAAAGGCCTCT | 4100 | AGAGGCCTTTCTAAATCTT |
| 540 | AGATTTAGAAAGGCCTCTT | 4101 | AAGAGGCCTTTCTAAATCT |
| 541 | GATTTAGAAAGGCCTCTTG | 4102 | CAAGAGGCCTTTCTAAATC |
| 542 | ATTTAGAAAGGCCTCTTGA | 4103 | TCAAGAGGCCTTTCTAAAT |
| 543 | TTTAGAAAGGCCTCTTGAG | 4104 | CTCAAGAGGCCTTTCTAAA |
| 544 | TTAGAAAGGCCTCTTGAGC | 4105 | GCTCAAGAGGCCTTTCTAA |
| 545 | TAGAAAGGCCTCTTGAGCT | 4106 | AGCTCAAGAGGCCTTTCTA |
| 546 | AGAAAGGCCTCTTGAGCTT | 4107 | AAGCTCAAGAGGCCTTTCT |
| 547 | GAAAGGCCTCTTGAGCTTA | 4108 | TAAGCTCAAGAGGCCTTTC |
| 548 | AAAGGCCTCTTGAGCTTAG | 4109 | CTAAGCTCAAGAGGCCTTT |
| 549 | AAGGCCTCTTGAGCTTAGA | 4110 | TCTAAGCTCAAGAGGCCTT |
| 550 | AGGCCTCTTGAGCTTAGAG | 4111 | CTCTAAGCTCAAGAGGCCT |
| 551 | GGCCTCTTGAGCTTAGAGT | 4112 | ACTCTAAGCTCAAGAGGCC |
| 552 | GCCTCTTGAGCTTAGAGTC | 4113 | GACTCTAAGCTCAAGAGGC |
| 553 | CCTCTTGAGCTTAGAGTCA | 4114 | TGACTCTAAGCTCAAGAGG |
| 554 | CTCTTGAGCTTAGAGTCAA | 4115 | TTGACTCTAAGCTCAAGAG |
| 555 | TCTTGAGCTTAGAGTCAAA | 4116 | TTTGACTCTAAGCTCAAGA |
| 556 | CTTGAGCTTAGAGTCAAAG | 4117 | CTTTGACTCTAAGCTCAAG |
| 557 | TTGAGCTTAGAGTCAAAGT | 4118 | ACTTTGACTCTAAGCTCAA |
| 558 | TGAGCTTAGAGTCAAAGTT | 4119 | AACTTTGACTCTAAGCTCA |
| 559 | GAGCTTAGAGTCAAAGTTA | 4120 | TAACTTTGACTCTAAGCTC |
| 560 | AGCTTAGAGTCAAAGTTAT | 4121 | ATAACTTTGACTCTAAGCT |
| 561 | GCTTAGAGTCAAAGTTATG | 4122 | CATAACTTTGACTCTAAGC |
| 562 | CTTAGAGTCAAAGTTATGG | 4123 | CCATAACTTTGACTCTAAG |
| 563 | TTAGAGTCAAAGTTATGGA | 4124 | TCCATAACTTTGACTCTAA |
| 564 | TAGAGTCAAAGTTATGGAC | 4125 | GTCCATAACTTTGACTCTA |
| 565 | AGAGTCAAAGTTATGGACA | 4126 | TGTCCATAACTTTGACTCT |
| 566 | GAGTCAAAGTTATGGACAT | 4127 | ATGTCCATAACTTTGACTC |
| 567 | AGTCAAAGTTATGGACATA | 4128 | TATGTCCATAACTTTGACT |
| 568 | GTCAAAGTTATGGACATAA | 4129 | TTATGTCCATAACTTTGAC |
| 569 | TCAAAGTTATGGACATAAA | 4130 | TTTATGTCCATAACTTTGA |
| 570 | CAAAGTTATGGACATAAAT | 4131 | ATTTATGTCCATAACTTTG |
| 571 | AAAGTTATGGACATAAATG | 4132 | CATTTATGTCCATAACTTT |
| 572 | AAGTTATGGACATAAATGA | 4133 | TCATTTATGTCCATAACTT |
| 573 | AGTTATGGACATAAATGAT | 4134 | ATCATTTATGTCCATAACT |
| 574 | GTTATGGACATAAATGATA | 4135 | TATCATTTATGTCCATAAC |
| 575 | TTATGGACATAAATGATAA | 4136 | TTATCATTTATGTCCATAA |
| 576 | TATGGACATAAATGATAAC | 4137 | GTTATCATTTATGTCCATA |
| 577 | ATGGACATAAATGATAACG | 4138 | CGTTATCATTTATGTCCAT |
| 578 | TGGACATAAATGATAACGC | 4139 | GCGTTATCATTTATGTCCA |
| 579 | GGACATAAATGATAACGCT | 4140 | AGCGTTATCATTTATGTCC |
| 580 | GACATAAATGATAACGCTC | 4141 | GAGCGTTATCATTTATGTC |
| 581 | ACATAAATGATAACGCTCC | 4142 | GGAGCGTTATCATTTATGT |
| 582 | CATAAATGATAACGCTCCA | 4143 | TGGAGCGTTATCATTTATG |
| 583 | ATAAATGATAACGCTCCAG | 4144 | CTGGAGCGTTATCATTTAT |
| 584 | TAAATGATAACGCTCCAGT | 4145 | ACTGGAGCGTTATCATTTA |
| 585 | AAATGATAACGCTCCAGTC | 4146 | GACTGGAGCGTTATCATTT |
| 586 | AATGATAACGCTCCAGTCT | 4147 | AGACTGGAGCGTTATCATT |
| 587 | ATGATAACGCTCCAGTCTT | 4148 | AAGACTGGAGCGTTATCAT |
| 588 | TGATAACGCTCCAGTCTTT | 4149 | AAAGACTGGAGCGTTATCA |
| 589 | GATAACGCTCCAGTCTTTT | 4150 | AAAAGACTGGAGCGTTATC |
| 590 | ATAACGCTCCAGTCTTTTC | 4151 | GAAAAGACTGGAGCGTTAT |
| 591 | TAACGCTCCAGTCTTTTCG | 4152 | CGAAAAGACTGGAGCGTTA |
| 592 | AACGCTCCAGTCTTTTCGC | 4153 | GCGAAAAGACTGGAGCGTT |
| 593 | ACGCTCCAGTCTTTTCGCA | 4154 | TGCGAAAAGACTGGAGCGT |
| 594 | CGCTCCAGTCTTTTCGCAA | 4155 | TTGCGAAAAGACTGGAGCG |
| 595 | GCTCCAGTCTTTTCGCAAA | 4156 | TTTGCGAAAAGACTGGAGC |
| 596 | CTCCAGTCTTTTCGCAAAG | 4157 | CTTTGCGAAAAGACTGGAG |
| 597 | TCCAGTCTTTTCGCAAAGT | 4158 | ACTTTGCGAAAAGACTGGA |
| 598 | CCAGTCTTTTCGCAAAGTG | 4159 | CACTTTGCGAAAAGACTGG |
| 599 | CAGTCTTTTCGCAAAGTGT | 4160 | ACACTTTGCGAAAAGACTG |
| 600 | AGTCTTTTCGCAAAGTGTA | 4161 | TACACTTTGCGAAAAGACT |
| 601 | GTCTTTTCGCAAAGTGTAT | 4162 | ATACACTTTGCGAAAAGAC |
| 602 | TCTTTTCGCAAAGTGTATA | 4163 | TATACACTTTGCGAAAAGA |
| 603 | CTTTTCGCAAAGTGTATAC | 4164 | GTATACACTTTGCGAAAAG |
| 604 | TTTTCGCAAAGTGTATACA | 4165 | TGTATACACTTTGCGAAAA |
| 605 | TTTCGCAAAGTGTATACAC | 4166 | GTGTATACACTTTGCGAAA |
| 606 | TTCGCAAAGTGTATACACA | 4167 | TGTGTATACACTTTGCGAA |
| 607 | TCGCAAAGTGTATACACAG | 4168 | CTGTGTATACACTTTGCGA |
| 608 | CGCAAAGTGTATACACAGC | 4169 | GCTGTGTATACACTTTGCG |
| 609 | GCAAAGTGTATACACAGCC | 4170 | GGCTGTGTATACACTTTGC |
| 610 | CAAAGTGTATACACAGCCA | 4171 | TGGCTGTGTATACACTTTG |
| 611 | AAAGTGTATACACAGCCAG | 4172 | CTGGCTGTGTATACACTTT |
| 612 | AAGTGTATACACAGCCAGC | 4173 | GCTGGCTGTGTATACACTT |
| 613 | AGTGTATACACAGCCAGCA | 4174 | TGCTGGCTGTGTATACACT |
| 614 | GTGTATACACAGCCAGCAT | 4175 | ATGCTGGCTGTGTATACAC |
| 615 | TGTATACACAGCCAGCATT | 4176 | AATGCTGGCTGTGTATACA |
| 616 | GTATACACAGCCAGCATTG | 4177 | CAATGCTGGCTGTGTATAC |
| 617 | TATACACAGCCAGCATTGA | 4178 | TCAATGCTGGCTGTGTATA |
| 618 | ATACACAGCCAGCATTGAA | 4179 | TTCAATGCTGGCTGTGTAT |
| 619 | TACACAGCCAGCATTGAAG | 4180 | CTTCAATGCTGGCTGTGTA |
| 620 | ACACAGCCAGCATTGAAGA | 4181 | TCTTCAATGCTGGCTGTGT |
| 621 | CACAGCCAGCATTGAAGAA | 4182 | TTCTTCAATGCTGGCTGTG |
| 622 | ACAGCCAGCATTGAAGAAA | 4183 | TTTCTTCAATGCTGGCTGT |
| 623 | CAGCCAGCATTGAAGAAAA | 4184 | TTTTCTTCAATGCTGGCTG |
| 624 | AGCCAGCATTGAAGAAAAT | 4185 | ATTTTCTTCAATGCTGGCT |
| 625 | GCCAGCATTGAAGAAAATA | 4186 | TATTTTCTTCAATGCTGGC |
| 626 | CCAGCATTGAAGAAAATAG | 4187 | CTATTTTCTTCAATGCTGG |
| 627 | CAGCATTGAAGAAAATAGT | 4188 | ACTATTTTCTTCAATGCTG |
| 628 | AGCATTGAAGAAAATAGTG | 4189 | CACTATTTTCTTCAATGCT |
| 629 | GCATTGAAGAAAATAGTGA | 4190 | TCACTATTTTCTTCAATGC |
| 630 | CATTGAAGAAAATAGTGAT | 4191 | ATCACTATTTTCTTCAATG |
| 631 | ATTGAAGAAAATAGTGATG | 4192 | CATCACTATTTTCTTCAAT |
| 632 | TTGAAGAAAATAGTGATGC | 4193 | GCATCACTATTTTCTTCAA |
| 633 | TGAAGAAAATAGTGATGCC | 4194 | GGCATCACTATTTTCTTCA |
| 634 | GAAGAAAATAGTGATGCCA | 4195 | TGGCATCACTATTTTCTTC |
| 635 | AAGAAAATAGTGATGCCAA | 4196 | TTGGCATCACTATTTTCTT |
| 636 | AGAAAATAGTGATGCCAAT | 4197 | ATTGGCATCACTATTTTCT |
| 637 | GAAAATAGTGATGCCAATA | 4198 | TATTGGCATCACTATTTTC |
| 638 | AAAATAGTGATGCCAATAC | 4199 | GTATTGGCATCACTATTTT |
| 639 | AAATAGTGATGCCAATACA | 4200 | TGTATTGGCATCACTATTT |
| 640 | AATAGTGATGCCAATACAT | 4201 | ATGTATTGGCATCACTATT |
| 641 | ATAGTGATGCCAATACATT | 4202 | AATGTATTGGCATCACTAT |
| 642 | TAGTGATGCCAATACATTG | 4203 | CAATGTATTGGCATCACTA |
| 643 | AGTGATGCCAATACATTGG | 4204 | CCAATGTATTGGCATCACT |
| 644 | GTGATGCCAATACATTGGT | 4205 | ACCAATGTATTGGCATCAC |
| 645 | TGATGCCAATACATTGGTA | 4206 | TACCAATGTATTGGCATCA |
| 646 | GATGCCAATACATTGGTAG | 4207 | CTACCAATGTATTGGCATC |
| 647 | ATGCCAATACATTGGTAGT | 4208 | ACTACCAATGTATTGGCAT |
| 648 | TGCCAATACATTGGTAGTA | 4209 | TACTACCAATGTATTGGCA |
| 649 | GCCAATACATTGGTAGTAA | 4210 | TTACTACCAATGTATTGGC |
| 650 | CCAATACATTGGTAGTAAA | 4211 | TTTACTACCAATGTATTGG |
| 651 | CAATACATTGGTAGTAAAG | 4212 | CTTTACTACCAATGTATTG |
| 652 | AATACATTGGTAGTAAAGT | 4213 | ACTTTACTACCAATGTATT |
| 653 | ATACATTGGTAGTAAAGTT | 4214 | AACTTTACTACCAATGTAT |
| 654 | TACATTGGTAGTAAAGTTA | 4215 | TAACTTTACTACCAATGTA |
| 655 | ACATTGGTAGTAAAGTTAT | 4216 | ATAACTTTACTACCAATGT |
| 656 | CATTGGTAGTAAAGTTATG | 4217 | CATAACTTTACTACCAATG |
| 657 | ATTGGTAGTAAAGTTATGT | 4218 | ACATAACTTTACTACCAAT |
| 658 | TTGGTAGTAAAGTTATGTG | 4219 | CACATAACTTTACTACCAA |
| 659 | TGGTAGTAAAGTTATGTGC | 4220 | GCACATAACTTTACTACCA |
| 660 | GGTAGTAAAGTTATGTGCC | 4221 | GGCACATAACTTTACTACC |
| 661 | GTAGTAAAGTTATGTGCCA | 4222 | TGGCACATAACTTTACTAC |
| 662 | TAGTAAAGTTATGTGCCAC | 4223 | GTGGCACATAACTTTACTA |
| 663 | AGTAAAGTTATGTGCCACA | 4224 | TGTGGCACATAACTTTACT |
| 664 | GTAAAGTTATGTGCCACAG | 4225 | CTGTGGCACATAACTTTAC |
| 665 | TAAAGTTATGTGCCACAGA | 4226 | TCTGTGGCACATAACTTTA |
| 666 | AAAGTTATGTGCCACAGAT | 4227 | ATCTGTGGCACATAACTTT |
| 667 | AAGTTATGTGCCACAGATG | 4228 | CATCTGTGGCACATAACTT |
| 668 | AGTTATGTGCCACAGATGC | 4229 | GCATCTGTGGCACATAACT |
| 669 | GTTATGTGCCACAGATGCA | 4230 | TGCATCTGTGGCACATAAC |
| 670 | TTATGTGCCACAGATGCAG | 4231 | CTGCATCTGTGGCACATAA |
| 671 | TATGTGCCACAGATGCAGA | 4232 | TCTGCATCTGTGGCACATA |
| 672 | ATGTGCCACAGATGCAGAT | 4233 | ATCTGCATCTGTGGCACAT |
| 673 | TGTGCCACAGATGCAGATG | 4234 | CATCTGCATCTGTGGCACA |
| 674 | GTGCCACAGATGCAGATGA | 4235 | TCATCTGCATCTGTGGCAC |
| 675 | TGCCACAGATGCAGATGAA | 4236 | TTCATCTGCATCTGTGGCA |
| 676 | GCCACAGATGCAGATGAAG | 4237 | CTTCATCTGCATCTGTGGC |
| 677 | CCACAGATGCAGATGAAGA | 4238 | TCTTCATCTGCATCTGTGG |
| 678 | CACAGATGCAGATGAAGAA | 4239 | TTCTTCATCTGCATCTGTG |
| 679 | ACAGATGCAGATGAAGAAA | 4240 | TTTCTTCATCTGCATCTGT |
| 680 | CAGATGCAGATGAAGAAAA | 4241 | TTTTCTTCATCTGCATCTG |
| 681 | AGATGCAGATGAAGAAAAT | 4242 | ATTTTCTTCATCTGCATCT |
| 682 | GATGCAGATGAAGAAAATC | 4243 | GATTTTCTTCATCTGCATC |
| 683 | ATGCAGATGAAGAAAATCA | 4244 | TGATTTTCTTCATCTGCAT |
| 684 | TGCAGATGAAGAAAATCAT | 4245 | ATGATTTTCTTCATCTGCA |
| 685 | GCAGATGAAGAAAATCATC | 4246 | GATGATTTTCTTCATCTGC |
| 686 | CAGATGAAGAAAATCATCT | 4247 | AGATGATTTTCTTCATCTG |
| 687 | AGATGAAGAAAATCATCTG | 4248 | CAGATGATTTTCTTCATCT |
| 688 | GATGAAGAAAATCATCTGA | 4249 | TCAGATGATTTTCTTCATC |
| 689 | ATGAAGAAAATCATCTGAA | 4250 | TTCAGATGATTTTCTTCAT |
| 690 | TGAAGAAAATCATCTGAAT | 4251 | ATTCAGATGATTTTCTTCA |
| 691 | GAAGAAAATCATCTGAATT | 4252 | AATTCAGATGATTTTCTTC |
| 692 | AAGAAAATCATCTGAATTC | 4253 | GAATTCAGATGATTTTCTT |
| 693 | AGAAAATCATCTGAATTCT | 4254 | AGAATTCAGATGATTTTCT |
| 694 | GAAAATCATCTGAATTCTA | 4255 | TAGAATTCAGATGATTTTC |
| 695 | AAAATCATCTGAATTCTAA | 4256 | TTAGAATTCAGATGATTTT |
| 696 | AAATCATCTGAATTCTAAA | 4257 | TTTAGAATTCAGATGATTT |
| 697 | AATCATCTGAATTCTAAAA | 4258 | TTTTAGAATTCAGATGATT |
| 698 | ATCATCTGAATTCTAAAAT | 4259 | ATTTTAGAATTCAGATGAT |
| 699 | TCATCTGAATTCTAAAATT | 4260 | AATTTTAGAATTCAGATGA |
| 700 | CATCTGAATTCTAAAATTG | 4261 | CAATTTTAGAATTCAGATG |
| 701 | ATCTGAATTCTAAAATTGC | 4262 | GCAATTTTAGAATTCAGAT |
| 702 | TCTGAATTCTAAAATTGCC | 4263 | GGCAATTTTAGAATTCAGA |
| 703 | CTGAATTCTAAAATTGCCT | 4264 | AGGCAATTTTAGAATTCAG |
| 704 | TGAATTCTAAAATTGCCTA | 4265 | TAGGCAATTTTAGAATTCA |
| 705 | GAATTCTAAAATTGCCTAC | 4266 | GTAGGCAATTTTAGAATTC |
| 706 | AATTCTAAAATTGCCTACA | 4267 | TGTAGGCAATTTTAGAATT |
| 707 | ATTCTAAAATTGCCTACAA | 4268 | TTGTAGGCAATTTTAGAAT |
| 708 | TTCTAAAATTGCCTACAAG | 4269 | CTTGTAGGCAATTTTAGAA |
| 709 | TCTAAAATTGCCTACAAGA | 4270 | TCTTGTAGGCAATTTTAGA |
| 710 | CTAAAATTGCCTACAAGAT | 4271 | ATCTTGTAGGCAATTTTAG |
| 711 | TAAAATTGCCTACAAGATC | 4272 | GATCTTGTAGGCAATTTTA |
| 712 | AAAATTGCCTACAAGATCG | 4273 | CGATCTTGTAGGCAATTTT |
| 713 | AAATTGCCTACAAGATCGT | 4274 | ACGATCTTGTAGGCAATTT |
| 714 | AATTGCCTACAAGATCGTC | 4275 | GACGATCTTGTAGGCAATT |
| 715 | ATTGCCTACAAGATCGTCT | 4276 | AGACGATCTTGTAGGCAAT |
| 716 | TTGCCTACAAGATCGTCTC | 4277 | GAGACGATCTTGTAGGCAA |
| 717 | TGCCTACAAGATCGTCTCT | 4278 | AGAGACGATCTTGTAGGCA |
| 718 | GCCTACAAGATCGTCTCTC | 4279 | GAGAGACGATCTTGTAGGC |
| 719 | CCTACAAGATCGTCTCTCA | 4280 | TGAGAGACGATCTTGTAGG |
| 720 | CTACAAGATCGTCTCTCAG | 4281 | CTGAGAGACGATCTTGTAG |
| 721 | TACAAGATCGTCTCTCAGG | 4282 | CCTGAGAGACGATCTTGTA |
| 722 | ACAAGATCGTCTCTCAGGA | 4283 | TCCTGAGAGACGATCTTGT |
| 723 | CAAGATCGTCTCTCAGGAG | 4284 | CTCCTGAGAGACGATCTTG |
| 724 | AAGATCGTCTCTCAGGAGC | 4285 | GCTCCTGAGAGACGATCTT |
| 725 | AGATCGTCTCTCAGGAGCC | 4286 | GGCTCCTGAGAGACGATCT |
| 726 | GATCGTCTCTCAGGAGCCA | 4287 | TGGCTCCTGAGAGACGATC |
| 727 | ATCGTCTCTCAGGAGCCAT | 4288 | ATGGCTCCTGAGAGACGAT |
| 728 | TCGTCTCTCAGGAGCCATC | 4289 | GATGGCTCCTGAGAGACGA |
| 729 | CGTCTCTCAGGAGCCATCA | 4290 | TGATGGCTCCTGAGAGACG |
| 730 | GTCTCTCAGGAGCCATCAG | 4291 | CTGATGGCTCCTGAGAGAC |
| 731 | TCTCTCAGGAGCCATCAGG | 4292 | CCTGATGGCTCCTGAGAGA |
| 732 | CTCTCAGGAGCCATCAGGT | 4293 | ACCTGATGGCTCCTGAGAG |
| 733 | TCTCAGGAGCCATCAGGTG | 4294 | CACCTGATGGCTCCTGAGA |
| 734 | CTCAGGAGCCATCAGGTGC | 4295 | GCACCTGATGGCTCCTGAG |
| 735 | TCAGGAGCCATCAGGTGCA | 4296 | TGCACCTGATGGCTCCTGA |
| 736 | CAGGAGCCATCAGGTGCAC | 4297 | GTGCACCTGATGGCTCCTG |
| 737 | AGGAGCCATCAGGTGCACC | 4298 | GGTGCACCTGATGGCTCCT |
| 738 | GGAGCCATCAGGTGCACCC | 4299 | GGGTGCACCTGATGGCTCC |
| 739 | GAGCCATCAGGTGCACCCA | 4300 | TGGGTGCACCTGATGGCTC |
| 740 | AGCCATCAGGTGCACCCAT | 4301 | ATGGGTGCACCTGATGGCT |
| 741 | GCCATCAGGTGCACCCATG | 4302 | CATGGGTGCACCTGATGGC |
| 742 | CCATCAGGTGCACCCATGT | 4303 | ACATGGGTGCACCTGATGG |
| 743 | CATCAGGTGCACCCATGTT | 4304 | AACATGGGTGCACCTGATG |
| 744 | ATCAGGTGCACCCATGTTC | 4305 | GAACATGGGTGCACCTGAT |
| 745 | TCAGGTGCACCCATGTTCA | 4306 | TGAACATGGGTGCACCTGA |
| 746 | CAGGTGCACCCATGTTCAT | 4307 | ATGAACATGGGTGCACCTG |
| 747 | AGGTGCACCCATGTTCATT | 4308 | AATGAACATGGGTGCACCT |
| 748 | GGTGCACCCATGTTCATTC | 4309 | GAATGAACATGGGTGCACC |
| 749 | GTGCACCCATGTTCATTCT | 4310 | AGAATGAACATGGGTGCAC |
| 750 | TGCACCCATGTTCATTCTG | 4311 | CAGAATGAACATGGGTGCA |
| 751 | GCACCCATGTTCATTCTGA | 4312 | TCAGAATGAACATGGGTGC |
| 752 | CACCCATGTTCATTCTGAA | 4313 | TTCAGAATGAACATGGGTG |
| 753 | ACCCATGTTCATTCTGAAT | 4314 | ATTCAGAATGAACATGGGT |
| 754 | CCCATGTTCATTCTGAATA | 4315 | TATTCAGAATGAACATGGG |
| 755 | CCATGTTCATTCTGAATAG | 4316 | CTATTCAGAATGAACATGG |
| 756 | CATGTTCATTCTGAATAGG | 4317 | CCTATTCAGAATGAACATG |
| 757 | ATGTTCATTCTGAATAGGT | 4318 | ACCTATTCAGAATGAACAT |
| 758 | TGTTCATTCTGAATAGGTA | 4319 | TACCTATTCAGAATGAACA |
| 759 | GTTCATTCTGAATAGGTAC | 4320 | GTACCTATTCAGAATGAAC |
| 760 | TTCATTCTGAATAGGTACA | 4321 | TGTACCTATTCAGAATGAA |
| 761 | TCATTCTGAATAGGTACAC | 4322 | GTGTACCTATTCAGAATGA |
| 762 | CATTCTGAATAGGTACACT | 4323 | AGTGTACCTATTCAGAATG |
| 763 | ATTCTGAATAGGTACACTG | 4324 | CAGTGTACCTATTCAGAAT |
| 764 | TTCTGAATAGGTACACTGG | 4325 | CCAGTGTACCTATTCAGAA |
| 765 | TCTGAATAGGTACACTGGA | 4326 | TCCAGTGTACCTATTCAGA |
| 766 | CTGAATAGGTACACTGGAG | 4327 | CTCCAGTGTACCTATTCAG |
| 767 | TGAATAGGTACACTGGAGA | 4328 | TCTCCAGTGTACCTATTCA |
| 768 | GAATAGGTACACTGGAGAA | 4329 | TTCTCCAGTGTACCTATTC |
| 769 | AATAGGTACACTGGAGAAG | 4330 | CTTCTCCAGTGTACCTATT |
| 770 | ATAGGTACACTGGAGAAGT | 4331 | ACTTCTCCAGTGTACCTAT |
| 771 | TAGGTACACTGGAGAAGTC | 4332 | GACTTCTCCAGTGTACCTA |
| 772 | AGGTACACTGGAGAAGTCT | 4333 | AGACTTCTCCAGTGTACCT |
| 773 | GGTACACTGGAGAAGTCTG | 4334 | CAGACTTCTCCAGTGTACC |
| 774 | GTACACTGGAGAAGTCTGC | 4335 | GCAGACTTCTCCAGTGTAC |
| 775 | TACACTGGAGAAGTCTGCA | 4336 | TGCAGACTTCTCCAGTGTA |
| 776 | ACACTGGAGAAGTCTGCAC | 4337 | GTGCAGACTTCTCCAGTGT |
| 777 | CACTGGAGAAGTCTGCACC | 4338 | GGTGCAGACTTCTCCAGTG |
| 778 | ACTGGAGAAGTCTGCACCA | 4339 | TGGTGCAGACTTCTCCAGT |
| 779 | CTGGAGAAGTCTGCACCAT | 4340 | ATGGTGCAGACTTCTCCAG |
| 780 | TGGAGAAGTCTGCACCATG | 4341 | CATGGTGCAGACTTCTCCA |
| 781 | GGAGAAGTCTGCACCATGT | 4342 | ACATGGTGCAGACTTCTCC |
| 782 | GAGAAGTCTGCACCATGTC | 4343 | GACATGGTGCAGACTTCTC |
| 783 | AGAAGTCTGCACCATGTCC | 4344 | GGACATGGTGCAGACTTCT |
| 784 | GAAGTCTGCACCATGTCCA | 4345 | TGGACATGGTGCAGACTTC |
| 785 | AAGTCTGCACCATGTCCAG | 4346 | CTGGACATGGTGCAGACTT |
| 786 | AGTCTGCACCATGTCCAGT | 4347 | ACTGGACATGGTGCAGACT |
| 787 | GTCTGCACCATGTCCAGTT | 4348 | AACTGGACATGGTGCAGAC |
| 788 | TCTGCACCATGTCCAGTTT | 4349 | AAACTGGACATGGTGCAGA |
| 789 | CTGCACCATGTCCAGTTTC | 4350 | GAAACTGGACATGGTGCAG |
| 790 | TGCACCATGTCCAGTTTCT | 4351 | AGAAACTGGACATGGTGCA |
| 791 | GCACCATGTCCAGTTTCTT | 4352 | AAGAAACTGGACATGGTGC |
| 792 | CACCATGTCCAGTTTCTTG | 4353 | CAAGAAACTGGACATGGTG |
| 793 | ACCATGTCCAGTTTCTTGG | 4354 | CCAAGAAACTGGACATGGT |
| 794 | CCATGTCCAGTTTCTTGGA | 4355 | TCCAAGAAACTGGACATGG |
| 795 | CATGTCCAGTTTCTTGGAC | 4356 | GTCCAAGAAACTGGACATG |
| 796 | ATGTCCAGTTTCTTGGACA | 4357 | TGTCCAAGAAACTGGACAT |
| 797 | TGTCCAGTTTCTTGGACAG | 4358 | CTGTCCAAGAAACTGGACA |
| 798 | GTCCAGTTTCTTGGACAGA | 4359 | TCTGTCCAAGAAACTGGAC |
| 799 | TCCAGTTTCTTGGACAGAG | 4360 | CTCTGTCCAAGAAACTGGA |
| 800 | CCAGTTTCTTGGACAGAGA | 4361 | TCTCTGTCCAAGAAACTGG |
| 801 | CAGTTTCTTGGACAGAGAG | 4362 | CTCTCTGTCCAAGAAACTG |
| 802 | AGTTTCTTGGACAGAGAGC | 4363 | GCTCTCTGTCCAAGAAACT |
| 803 | GTTTCTTGGACAGAGAGCA | 4364 | TGCTCTCTGTCCAAGAAAC |
| 804 | TTTCTTGGACAGAGAGCAA | 4365 | TTGCTCTCTGTCCAAGAAA |
| 805 | TTCTTGGACAGAGAGCAAC | 4366 | GTTGCTCTCTGTCCAAGAA |
| 806 | TCTTGGACAGAGAGCAACA | 4367 | TGTTGCTCTCTGTCCAAGA |
| 807 | CTTGGACAGAGAGCAACAC | 4368 | GTGTTGCTCTCTGTCCAAG |
| 808 | TTGGACAGAGAGCAACACA | 4369 | TGTGTTGCTCTCTGTCCAA |
| 809 | TGGACAGAGAGCAACACAG | 4370 | CTGTGTTGCTCTCTGTCCA |
| 810 | GGACAGAGAGCAACACAGT | 4371 | ACTGTGTTGCTCTCTGTCC |
| 811 | GACAGAGAGCAACACAGTA | 4372 | TACTGTGTTGCTCTCTGTC |
| 812 | ACAGAGAGCAACACAGTAT | 4373 | ATACTGTGTTGCTCTCTGT |
| 813 | CAGAGAGCAACACAGTATG | 4374 | CATACTGTGTTGCTCTCTG |
| 814 | AGAGAGCAACACAGTATGT | 4375 | ACATACTGTGTTGCTCTCT |
| 815 | GAGAGCAACACAGTATGTA | 4376 | TACATACTGTGTTGCTCTC |
| 816 | AGAGCAACACAGTATGTAC | 4377 | GTACATACTGTGTTGCTCT |
| 817 | GAGCAACACAGTATGTACA | 4378 | TGTACATACTGTGTTGCTC |
| 818 | AGCAACACAGTATGTACAA | 4379 | TTGTACATACTGTGTTGCT |
| 819 | GCAACACAGTATGTACAAC | 4380 | GTTGTACATACTGTGTTGC |
| 820 | CAACACAGTATGTACAACC | 4381 | GGTTGTACATACTGTGTTG |
| 821 | AACACAGTATGTACAACCT | 4382 | AGGTTGTACATACTGTGTT |
| 822 | ACACAGTATGTACAACCTG | 4383 | CAGGTTGTACATACTGTGT |
| 823 | CACAGTATGTACAACCTGG | 4384 | CCAGGTTGTACATACTGTG |
| 824 | ACAGTATGTACAACCTGGT | 4385 | ACCAGGTTGTACATACTGT |
| 825 | CAGTATGTACAACCTGGTT | 4386 | AACCAGGTTGTACATACTG |
| 826 | AGTATGTACAACCTGGTTG | 4387 | CAACCAGGTTGTACATACT |
| 827 | GTATGTACAACCTGGTTGT | 4388 | ACAACCAGGTTGTACATAC |
| 828 | TATGTACAACCTGGTTGTG | 4389 | CACAACCAGGTTGTACATA |
| 829 | ATGTACAACCTGGTTGTGA | 4390 | TCACAACCAGGTTGTACAT |
| 830 | TGTACAACCTGGTTGTGAG | 4391 | CTCACAACCAGGTTGTACA |
| 831 | GTACAACCTGGTTGTGAGA | 4392 | TCTCACAACCAGGTTGTAC |
| 832 | TACAACCTGGTTGTGAGAG | 4393 | CTCTCACAACCAGGTTGTA |
| 833 | ACAACCTGGTTGTGAGAGG | 4394 | CCTCTCACAACCAGGTTGT |
| 834 | CAACCTGGTTGTGAGAGGC | 4395 | GCCTCTCACAACCAGGTTG |
| 835 | AACCTGGTTGTGAGAGGCT | 4396 | AGCCTCTCACAACCAGGTT |
| 836 | ACCTGGTTGTGAGAGGCTC | 4397 | GAGCCTCTCACAACCAGGT |
| 837 | CCTGGTTGTGAGAGGCTCA | 4398 | TGAGCCTCTCACAACCAGG |
| 838 | CTGGTTGTGAGAGGCTCAG | 4399 | CTGAGCCTCTCACAACCAG |
| 839 | TGGTTGTGAGAGGCTCAGA | 4400 | TCTGAGCCTCTCACAACCA |
| 840 | GGTTGTGAGAGGCTCAGAT | 4401 | ATCTGAGCCTCTCACAACC |
| 841 | GTTGTGAGAGGCTCAGATC | 4402 | GATCTGAGCCTCTCACAAC |
| 842 | TTGTGAGAGGCTCAGATCG | 4403 | CGATCTGAGCCTCTCACAA |
| 843 | TGTGAGAGGCTCAGATCGG | 4404 | CCGATCTGAGCCTCTCACA |
| 844 | GTGAGAGGCTCAGATCGGG | 4405 | CCCGATCTGAGCCTCTCAC |
| 845 | TGAGAGGCTCAGATCGGGA | 4406 | TCCCGATCTGAGCCTCTCA |
| 846 | GAGAGGCTCAGATCGGGAT | 4407 | ATCCCGATCTGAGCCTCTC |
| 847 | AGAGGCTCAGATCGGGATG | 4408 | CATCCCGATCTGAGCCTCT |
| 848 | GAGGCTCAGATCGGGATGG | 4409 | CCATCCCGATCTGAGCCTC |
| 849 | AGGCTCAGATCGGGATGGA | 4410 | TCCATCCCGATCTGAGCCT |
| 850 | GGCTCAGATCGGGATGGAG | 4411 | CTCCATCCCGATCTGAGCC |
| 851 | GCTCAGATCGGGATGGAGC | 4412 | GCTCCATCCCGATCTGAGC |
| 852 | CTCAGATCGGGATGGAGCT | 4413 | AGCTCCATCCCGATCTGAG |
| 853 | TCAGATCGGGATGGAGCTG | 4414 | CAGCTCCATCCCGATCTGA |
| 854 | CAGATCGGGATGGAGCTGC | 4415 | GCAGCTCCATCCCGATCTG |
| 855 | AGATCGGGATGGAGCTGCA | 4416 | TGCAGCTCCATCCCGATCT |
| 856 | GATCGGGATGGAGCTGCAG | 4417 | CTGCAGCTCCATCCCGATC |
| 857 | ATCGGGATGGAGCTGCAGA | 4418 | TCTGCAGCTCCATCCCGAT |
| 858 | TCGGGATGGAGCTGCAGAT | 4419 | ATCTGCAGCTCCATCCCGA |
| 859 | CGGGATGGAGCTGCAGATG | 4420 | CATCTGCAGCTCCATCCCG |
| 860 | GGGATGGAGCTGCAGATGG | 4421 | CCATCTGCAGCTCCATCCC |
| 861 | GGATGGAGCTGCAGATGGA | 4422 | TCCATCTGCAGCTCCATCC |
| 862 | GATGGAGCTGCAGATGGAC | 4423 | GTCCATCTGCAGCTCCATC |
| 863 | ATGGAGCTGCAGATGGACT | 4424 | AGTCCATCTGCAGCTCCAT |
| 864 | TGGAGCTGCAGATGGACTG | 4425 | CAGTCCATCTGCAGCTCCA |
| 865 | GGAGCTGCAGATGGACTGT | 4426 | ACAGTCCATCTGCAGCTCC |
| 866 | GAGCTGCAGATGGACTGTC | 4427 | GACAGTCCATCTGCAGCTC |
| 867 | AGCTGCAGATGGACTGTCT | 4428 | AGACAGTCCATCTGCAGCT |
| 868 | GCTGCAGATGGACTGTCTT | 4429 | AAGACAGTCCATCTGCAGC |
| 869 | CTGCAGATGGACTGTCTTC | 4430 | GAAGACAGTCCATCTGCAG |
| 870 | TGCAGATGGACTGTCTTCT | 4431 | AGAAGACAGTCCATCTGCA |
| 871 | GCAGATGGACTGTCTTCTG | 4432 | CAGAAGACAGTCCATCTGC |
| 872 | CAGATGGACTGTCTTCTGA | 4433 | TCAGAAGACAGTCCATCTG |
| 873 | AGATGGACTGTCTTCTGAG | 4434 | CTCAGAAGACAGTCCATCT |
| 874 | GATGGACTGTCTTCTGAGT | 4435 | ACTCAGAAGACAGTCCATC |
| 875 | ATGGACTGTCTTCTGAGTG | 4436 | CACTCAGAAGACAGTCCAT |
| 876 | TGGACTGTCTTCTGAGTGT | 4437 | ACACTCAGAAGACAGTCCA |
| 877 | GGACTGTCTTCTGAGTGTG | 4438 | CACACTCAGAAGACAGTCC |
| 878 | GACTGTCTTCTGAGTGTGA | 4439 | TCACACTCAGAAGACAGTC |
| 879 | ACTGTCTTCTGAGTGTGAC | 4440 | GTCACACTCAGAAGACAGT |
| 880 | CTGTCTTCTGAGTGTGACT | 4441 | AGTCACACTCAGAAGACAG |
| 881 | TGTCTTCTGAGTGTGACTG | 4442 | CAGTCACACTCAGAAGACA |
| 882 | GTCTTCTGAGTGTGACTGT | 4443 | ACAGTCACACTCAGAAGAC |
| 883 | TCTTCTGAGTGTGACTGTA | 4444 | TACAGTCACACTCAGAAGA |
| 884 | CTTCTGAGTGTGACTGTAG | 4445 | CTACAGTCACACTCAGAAG |
| 885 | TTCTGAGTGTGACTGTAGA | 4446 | TCTACAGTCACACTCAGAA |
| 886 | TCTGAGTGTGACTGTAGAA | 4447 | TTCTACAGTCACACTCAGA |
| 887 | CTGAGTGTGACTGTAGAAT | 4448 | ATTCTACAGTCACACTCAG |
| 888 | TGAGTGTGACTGTAGAATC | 4449 | GATTCTACAGTCACACTCA |
| 889 | GAGTGTGACTGTAGAATCA | 4450 | TGATTCTACAGTCACACTC |
| 890 | AGTGTGACTGTAGAATCAA | 4451 | TTGATTCTACAGTCACACT |
| 891 | GTGTGACTGTAGAATCAAG | 4452 | CTTGATTCTACAGTCACAC |
| 892 | TGTGACTGTAGAATCAAGG | 4453 | CCTTGATTCTACAGTCACA |
| 893 | GTGACTGTAGAATCAAGGT | 4454 | ACCTTGATTCTACAGTCAC |
| 894 | TGACTGTAGAATCAAGGTT | 4455 | AACCTTGATTCTACAGTCA |
| 895 | GACTGTAGAATCAAGGTTT | 4456 | AAACCTTGATTCTACAGTC |
| 896 | ACTGTAGAATCAAGGTTTT | 4457 | AAAACCTTGATTCTACAGT |
| 897 | CTGTAGAATCAAGGTTTTA | 4458 | TAAAACCTTGATTCTACAG |
| 898 | TGTAGAATCAAGGTTTTAG | 4459 | CTAAAACCTTGATTCTACA |
| 899 | GTAGAATCAAGGTTTTAGA | 4460 | TCTAAAACCTTGATTCTAC |
| 900 | TAGAATCAAGGTTTTAGAC | 4461 | GTCTAAAACCTTGATTCTA |
| 901 | AGAATCAAGGTTTTAGACG | 4462 | CGTCTAAAACCTTGATTCT |
| 902 | GAATCAAGGTTTTAGACGT | 4463 | ACGTCTAAAACCTTGATTC |
| 903 | AATCAAGGTTTTAGACGTC | 4464 | GACGTCTAAAACCTTGATT |
| 904 | ATCAAGGTTTTAGACGTCA | 4465 | TGACGTCTAAAACCTTGAT |
| 905 | TCAAGGTTTTAGACGTCAA | 4466 | TTGACGTCTAAAACCTTGA |
| 906 | CAAGGTTTTAGACGTCAAC | 4467 | GTTGACGTCTAAAACCTTG |
| 907 | AAGGTTTTAGACGTCAACG | 4468 | CGTTGACGTCTAAAACCTT |
| 908 | AGGTTTTAGACGTCAACGA | 4469 | TCGTTGACGTCTAAAACCT |
| 909 | GGTTTTAGACGTCAACGAT | 4470 | ATCGTTGACGTCTAAAACC |
| 910 | GTTTTAGACGTCAACGATA | 4471 | TATCGTTGACGTCTAAAAC |
| 911 | TTTTAGACGTCAACGATAA | 4472 | TTATCGTTGACGTCTAAAA |
| 912 | TTTAGACGTCAACGATAAT | 4473 | ATTATCGTTGACGTCTAAA |
| 913 | TTAGACGTCAACGATAATT | 4474 | AATTATCGTTGACGTCTAA |
| 914 | TAGACGTCAACGATAATTT | 4475 | AAATTATCGTTGACGTCTA |
| 915 | AGACGTCAACGATAATTTC | 4476 | GAAATTATCGTTGACGTCT |
| 916 | GACGTCAACGATAATTTCC | 4477 | GGAAATTATCGTTGACGTC |
| 917 | ACGTCAACGATAATTTCCC | 4478 | GGGAAATTATCGTTGACGT |
| 918 | CGTCAACGATAATTTCCCC | 4479 | GGGGAAATTATCGTTGACG |
| 919 | GTCAACGATAATTTCCCCA | 4480 | TGGGGAAATTATCGTTGAC |
| 920 | TCAACGATAATTTCCCCAC | 4481 | GTGGGGAAATTATCGTTGA |
| 921 | CAACGATAATTTCCCCACC | 4482 | GGTGGGGAAATTATCGTTG |
| 922 | AACGATAATTTCCCCACCT | 4483 | AGGTGGGGAAATTATCGTT |
| 923 | ACGATAATTTCCCCACCTT | 4484 | AAGGTGGGGAAATTATCGT |
| 924 | CGATAATTTCCCCACCTTA | 4485 | TAAGGTGGGGAAATTATCG |
| 925 | GATAATTTCCCCACCTTAG | 4486 | CTAAGGTGGGGAAATTATC |
| 926 | ATAATTTCCCCACCTTAGA | 4487 | TCTAAGGTGGGGAAATTAT |
| 927 | TAATTTCCCCACCTTAGAG | 4488 | CTCTAAGGTGGGGAAATTA |
| 928 | AATTTCCCCACCTTAGAGA | 4489 | TCTCTAAGGTGGGGAAATT |
| 929 | ATTTCCCCACCTTAGAGAA | 4490 | TTCTCTAAGGTGGGGAAAT |
| 930 | TTTCCCCACCTTAGAGAAA | 4491 | TTTCTCTAAGGTGGGGAAA |
| 931 | TTCCCCACCTTAGAGAAAA | 4492 | TTTTCTCTAAGGTGGGGAA |
| 932 | TCCCCACCTTAGAGAAAAC | 4493 | GTTTTCTCTAAGGTGGGGA |
| 933 | CCCCACCTTAGAGAAAACT | 4494 | AGTTTTCTCTAAGGTGGGG |
| 934 | CCCACCTTAGAGAAAACTT | 4495 | AAGTTTTCTCTAAGGTGGG |
| 935 | CCACCTTAGAGAAATCTTC | 4496 | GAAGTTTTCTCTAAGGTGG |
| 936 | CACCTTAGAGAAAACTTCA | 4497 | TGAAGTTTTCTCTAAGGTG |
| 937 | ACCTTAGAGAAAACTTCAT | 4498 | ATGAAGTTTTCTCTAAGGT |
| 938 | CCTTAGAGAAAACTTCATA | 4499 | TATGAAGTTTTCTCTAAGG |
| 939 | CTTAGAGAAAACTTCATAC | 4500 | GTATGAAGTTTTCTCTAAG |
| 940 | TTAGAGAAAACTTCATACT | 4501 | AGTATGAAGTTTTCTCTAA |
| 941 | TAGAGAAAACTTCATACTC | 4502 | GAGTATGAAGTTTTCTCTA |
| 942 | AGAGAAAACTTCATACTCA | 4503 | TGAGTATGAAGTTTTCTCT |
| 943 | GAGAAAACTTCATACTCAG | 4504 | CTGAGTATGAAGTTTTCTC |
| 944 | AGAAAACTTCATACTCAGC | 4505 | GCTGAGTATGAAGTTTTCT |
| 945 | GAAAACTTCATACTCAGCC | 4506 | GGCTGAGTATGAAGTTTTC |
| 946 | AAAACTTCATACTCAGCCA | 4507 | TGGCTGAGTATGAAGTTTT |
| 947 | AAACTTCATACTCAGCCAG | 4508 | CTGGCTGAGTATGAAGTTT |
| 948 | AACTTCATACTCAGCCAGT | 4509 | ACTGGCTGAGTATGAAGTT |
| 949 | ACTTCATACTCAGCCAGTA | 4510 | TAGTGGCTGAGTATGAAGT |
| 950 | CTTCATACTCAGCCAGTAT | 4511 | ATACTGGCTGAGTATGAAG |
| 951 | TTCATACTCAGCCAGTATT | 4512 | AATACTGGCTGAGTATGAA |
| 952 | TCATACTCAGCCAGTATTG | 4513 | CAATACTGGCTGAGTATGA |
| 953 | CATACTCAGCCAGTATTGA | 4514 | TCAATACTGGCTGAGTATG |
| 954 | ATACTCAGCCAGTATTGAA | 4515 | TTCAATACTGGCTGAGTAT |
| 955 | TACTCAGCCAGTATTGAAG | 4516 | CTTCAATACTGGCTGAGTA |
| 956 | ACTCAGCCAGTATTGAAGA | 4517 | TCTTCAATACTGGCTGAGT |
| 957 | CTCAGCCAGTATTGAAGAG | 4518 | CTCTTCAATACTGGCTGAG |
| 958 | TCAGCCAGTATTGAAGAGA | 4519 | TCTCTTCAATACTGGCTGA |
| 959 | CAGCCAGTATTGAAGAGAA | 4520 | TTCTCTTCAATACTGGCTG |
| 960 | AGCCAGTATTGAAGAGAAT | 4521 | ATTCTCTTCAATACTGGCT |
| 961 | GCCAGTATTGAAGAGAATT | 4522 | AATTCTCTTCAATACTGGC |
| 962 | CCAGTATTGAAGAGAATTG | 4523 | CAATTCTCTTCAATACTGG |
| 963 | CAGTATTGAAGAGAATTGT | 4524 | ACAATTCTCTTCAATACTG |
| 964 | AGTATTGAAGAGAATTGTT | 4525 | AACAATTCTCTTCAATACT |
| 965 | GTATTGAAGAGAATTGTTT | 4526 | AAACAATTCTCTTCAATAC |
| 966 | TATTGAAGAGAATTGTTTA | 4527 | TAAACAATTCTCTTCAATA |
| 967 | ATTGAAGAGAATTGTTTAA | 4528 | TTAAACAATTCTCTTCAAT |
| 968 | TTGAAGAGAATTGTTTAAG | 4529 | CTTAAACAATTCTCTTCAA |
| 969 | TGAAGAGAATTGTTTAAGT | 4530 | ACTTAAACAATTCTCTTCA |
| 970 | GAAGAGAATTGTTTAAGTT | 4531 | AACTTAAACAATTCTCTTC |
| 971 | AAGAGAATTGTTTAAGTTC | 4532 | GAACTTAAACAATTCTCTT |
| 972 | AGAGAATTGTTTAAGTTCG | 4533 | CGAACTTAAACAATTCTCT |
| 973 | GAGAATTGTTTAAGTTCGG | 4534 | CCGAACTTAAACAATTCTC |
| 974 | AGAATTGTTTAAGTTCGGA | 4535 | TCCGAACTTAAACAATTCT |
| 975 | GAATTGTTTAAGTTCGGAA | 4536 | TTCCGAACTTAAACAATTC |
| 976 | AATTGTTTAAGTTCGGAAC | 4537 | GTTCCGAACTTAAACAATT |
| 977 | ATTGTTTAAGTTCGGAACT | 4538 | AGTTCCGAACTTAAACAAT |
| 978 | TTGTTTAAGTTCGGAACTG | 4539 | CAGTTCCGAACTTAAACAA |
| 979 | TGTTTAAGTTCGGAACTGA | 4540 | TCAGTTCCGAACTTAAACA |
| 980 | GTTTAAGTTCGGAACTGAT | 4541 | ATCAGTTCCGAACTTAAAC |
| 981 | TTTAAGTTCGGAACTGATA | 4542 | TATCAGTTCCGAACTTAAA |
| 982 | TTAAGTTCGGAACTGATAC | 4543 | GTATCAGTTCCGAACTTAA |
| 983 | TAAGTTCGGAACTGATACG | 4544 | CGTATCAGTTCCGAACTTA |
| 984 | AAGTTCGGAACTGATACGA | 4545 | TCGTATCAGTTCCGAACTT |
| 985 | AGTTCGGAACTGATACGAT | 4546 | ATCGTATCAGTTCCGAACT |
| 986 | GTTCGGAACTGATACGATT | 4547 | AATCGTATCAGTTCCGAAC |
| 987 | TTCGGAACTGATACGATTA | 4548 | TAATCGTATCAGTTCCGAA |
| 988 | TCGGAACTGATACGATTAC | 4549 | GTAATCGTATCAGTTCCGA |
| 989 | CGGAACTGATACGATTACA | 4550 | TGTAATCGTATCAGTTCCG |
| 990 | GGAACTGATACGATTACAA | 4551 | TTGTAATCGTATCAGTTCC |
| 991 | GAACTGATACGATTACAAG | 4552 | CTTGTAATCGTATCAGTTC |
| 992 | AACTGATACGATTACAAGC | 4553 | GCTTGTAATCGTATCAGTT |
| 993 | ACTGATACGATTACAAGCA | 4554 | TGCTTGTAATCGTATCAGT |
| 994 | CTGATACGATTACAAGCAA | 4555 | TTGCTTGTAATCGTATCAG |
| 995 | TGATACGATTACAAGCAAT | 4556 | ATTGCTTGTAATCGTATCA |
| 996 | GATACGATTACAAGCAATT | 4557 | AATTGCTTGTAATCGTATC |
| 997 | ATACGATTACAAGCAATTG | 4558 | CAATTGCTTGTAATCGTAT |
| 998 | TAGGATTACAAGCAATTGA | 4559 | TCAATTGCTTGTAATCGTA |
| 999 | ACGATTACAAGCAATTGAT | 4560 | ATCAATTGCTTGTAATCGT |
| 1000 | CGATTACAAGCAATTGATC | 4561 | GATCAATTGCTTGTAATCG |
| 1001 | GATTACAAGCAATTGATCT | 4562 | AGATCAATTGCTTGTAATC |
| 1002 | ATTACAAGCAATTGATCTT | 4563 | AAGATCAATTGCTTGTAAT |
| 1003 | TTACAAGCAATTGATCTTG | 4564 | CAAGATCAATTGCTTGTAA |
| 1004 | TACAAGCAATTGATCTTGA | 4565 | TCAAGATCAATTGCTTGTA |
| 1005 | ACAAGCAATTGATCTTGAT | 4566 | ATCAAGATCAATTGCTTGT |
| 1006 | CAAGCAATTGATCTTGATG | 4567 | CATCAAGATCAATTGCTTG |
| 1007 | AAGCAATTGATCTTGATGA | 4568 | TCATCAAGATCAATTGCTT |
| 1008 | AGCAATTGATCTTGATGAA | 4569 | TTCATCAAGATCAATTGCT |
| 1009 | GCAATTGATCTTGATGAAG | 4570 | CTTCATCAAGATCAATTGC |
| 1010 | CAATTGATCTTGATGAAGA | 4571 | TCTTCATCAAGATCAATTG |
| 1011 | AATTGATCTTGATGAAGAA | 4572 | TTCTTCATCAAGATCAATT |
| 1012 | ATTGATCTTGATGAAGAAG | 4573 | CTTCTTCATCAAGATCAAT |
| 1013 | TTGATCTTGATGAAGAAGG | 4574 | CCTTCTTCATCAAGATCAA |
| 1014 | TGATCTTGATGAAGAAGGC | 4575 | GCCTTCTTCATCAAGATCA |
| 1015 | GATCTTGATGAAGAAGGCA | 4576 | TGCCTTCTTCATCAAGATC |
| 1016 | ATCTTGATGAAGAAGGCAC | 4577 | GTGCCTTCTTCATCAAGAT |
| 1017 | TCTTGATGAAGAAGGCACT | 4578 | AGTGCCTTCTTCATCAAGA |
| 1018 | CTTGATGAAGAAGGCACTG | 4579 | CAGTGCCTTCTTCATCAAG |
| 1019 | TTGATGAAGAAGGCACTGA | 4580 | TCAGTGCCTTCTTCATCAA |
| 1020 | TGATGAAGAAGGCACTGAT | 4581 | ATCAGTGCCTTCTTCATCA |
| 1021 | GATGAAGAAGGCACTGATA | 4582 | TATCAGTGCCTTCTTCATC |
| 1022 | ATGAAGAAGGCACTGATAA | 4583 | TTATCAGTGCCTTCTTCAT |
| 1023 | TGAAGAAGGCACTGATAAC | 4584 | GTTATCAGTGCCTTCTTCA |
| 1024 | GAAGAAGGCACTGATAACT | 4585 | AGTTATCAGTGCCTTCTTC |
| 1025 | AAGAAGGCACTGATAACTG | 4586 | CAGTTATCAGTGCCTTCTT |
| 1026 | AGAAGGCACTGATAACTGG | 4587 | CCAGTTATCAGTGCCTTCT |
| 1027 | GAAGGCACTGATAACTGGT | 4588 | ACCAGTTATCAGTGCCTTC |
| 1028 | AAGGCACTGATAACTGGTT | 4589 | AACCAGTTATCAGTGCCTT |
| 1029 | AGGCACTGATAACTGGTTG | 4590 | CAACCAGTTATCAGTGCCT |
| 1030 | GGCACTGATAACTGGTTGG | 4591 | CCAACCAGTTATCAGTGCC |
| 1031 | GCACTGATAACTGGTTGGC | 4592 | GCCAACCAGTTATCAGTGC |
| 1032 | CACTGATAACTGGTTGGCT | 4593 | AGCCAACCAGTTATCAGTG |
| 1033 | ACTGATAACTGGTTGGCTC | 4594 | GAGCCAACCAGTTATCAGT |
| 1034 | CTGATAACTGGTTGGCTCA | 4595 | TGAGCCAACCAGTTATCAG |
| 1035 | TGATAACTGGTTGGCTCAA | 4596 | TTGAGCCAACCAGTTATCA |
| 1036 | GATAACTGGTTGGCTCAAT | 4597 | ATTGAGCCAACCAGTTATC |
| 1037 | ATAACTGGTTGGCTCAATA | 4598 | TATTGAGCCAACCAGTTAT |
| 1038 | TAACTGGTTGGCTCAATAT | 4599 | ATATTGAGCCAACCAGTTA |
| 1039 | AACTGGTTGGCTCAATATT | 4600 | AATATTGAGCCAACCAGTT |
| 1040 | ACTGGTTGGCTCAATATTT | 4601 | AAATATTGAGCCAACCAGT |
| 1041 | CTGGTTGGCTCAATATTTA | 4602 | TAAATATTGAGCCAACCAG |
| 1042 | TGGTTGGCTCAATATTTAA | 4603 | TTAAATATTGAGCCAACCA |
| 1043 | GGTTGGCTCAATATTTAAT | 4604 | ATTAAATATTGAGCCAACC |
| 1044 | GTTGGCTCAATATTTAATT | 4605 | AATTAAATATTGAGCCAAC |
| 1045 | TTGGCTCAATATTTAATTC | 4606 | GAATTAAATATTGAGCCAA |
| 1046 | TGGCTCAATATTTAATTCT | 4607 | AGAATTAAATATTGAGCCA |
| 1047 | GGCTCAATATTTAATTCTC | 4608 | GAGAATTAAATATTGAGCC |
| 1048 | GCTCAATATTTAATTCTCT | 4609 | AGAGAATTAAATATTGAGC |
| 1049 | CTCAATATTTAATTCTCTC | 4610 | GAGAGAATTAAATATTGAG |
| 1050 | TCAATATTTAATTCTCTCT | 4611 | AGAGAGAATTAAATATTGA |
| 1051 | CAATATTTAATTCTCTCTG | 4612 | CAGAGAGAATTAAATATTG |
| 1052 | AATATTTAATTCTCTCTGG | 4613 | CCAGAGAGAATTAAATATT |
| 1053 | ATATTTAATTCTCTCTGGA | 4614 | TCCAGAGAGAATTAAATAT |
| 1054 | TATTTAATTCTCTCTGGAA | 4615 | TTCCAGAGAGAATTAAATA |
| 1055 | ATTTAATTCTCTCTGGAAA | 4616 | TTTCCAGAGAGAATTAAAT |
| 1056 | TTTAATTCTCTCTGGAAAT | 4617 | ATTTCCAGAGAGAATTAAA |
| 1057 | TTAATTCTCTCTGGAAATG | 4618 | CATTTCCAGAGAGAATTAA |
| 1058 | TAATTCTCTCTGGAAATGA | 4619 | TCATTTCCAGAGAGAATTA |
| 1059 | AATTCTCTCTGGAAATGAT | 4620 | ATCATTTCCAGAGAGAATT |
| 1060 | ATTCTCTCTGGAAATGATG | 4621 | CATCATTTCCAGAGAGAAT |
| 1061 | TTCTCTCTGGAAATGATGG | 4622 | CCATCATTTCCAGAGAGAA |
| 1062 | TCTCTCTGGAAATGATGGG | 4623 | CCCATCATTTCCAGAGAGA |
| 1063 | CTCTCTGGAAATGATGGGA | 4624 | TCCCATCATTTCCAGAGAG |
| 1064 | TCTCTGGAAATGATGGGAA | 4625 | TTCCCATCATTTCCAGAGA |
| 1065 | CTCTGGAAATGATGGGAAT | 4626 | ATTCCCATCATTTCCAGAG |
| 1066 | TCTGGAAATGATGGGAATT | 4627 | AATTCCCATCATTTCCAGA |
| 1067 | CTGGAAATGATGGGAATTG | 4628 | CAATTCCCATCATTTCCAG |
| 1068 | TGGAAATGATGGGAATTGG | 4629 | CCAATTCCCATCATTTCCA |
| 1069 | GGAAATGATGGGAATTGGT | 4630 | ACCAATTCCCATCATTTCC |
| 1070 | GAAATGATGGGAATTGGTT | 4631 | AACCAATTCCCATCATTTC |
| 1071 | AAATGATGGGAATTGGTTC | 4632 | GAACCAATTCCCATCATTT |
| 1072 | AATGATGGGAATTGGTTCG | 4633 | CGAACCAATTCCCATCATT |
| 1073 | ATGATGGGAATTGGTTCGA | 4634 | TCGAACCAATTCCCATCAT |
| 1074 | TGATGGGAATTGGTTCGAT | 4635 | ATCGAACCAATTCCCATCA |
| 1075 | GATGGGAATTGGTTCGATA | 4636 | TATCGAACCAATTCCCATC |
| 1076 | ATGGGAATTGGTTCGATAT | 4637 | ATATCGAACCAATTCCCAT |
| 1077 | TGGGAATTGGTTCGATATT | 4638 | AATATCGAACCAATTCCCA |
| 1078 | GGGAATTGGTTCGATATTC | 4639 | GAATATCGAACCAATTCCC |
| 1079 | GGAATTGGTTCGATATTCA | 4640 | TGAATATCGAACCAATTCC |
| 1080 | GAATTGGTTCGATATTCAA | 4641 | TTGAATATCGAACCAATTC |
| 1081 | AATTGGTTCGATATTCAAA | 4642 | TTTGAATATCGAACCAATT |
| 1082 | ATTGGTTCGATATTCAAAC | 4643 | GTTTGAATATCGAACCAAT |
| 1083 | TTGGTTCGATATTCAAACA | 4644 | TGTTTGAATATCGAACCAA |
| 1084 | TGGTTCGATATTCAAACAG | 4645 | CTGTTTGAATATCGAACCA |
| 1085 | GGTTCGATATTCAAACAGA | 4646 | TCTGTTTGAATATCGAACC |
| 1086 | GTTCGATATTCAAACAGAT | 4647 | ATCTGTTTGAATATCGAAC |
| 1087 | TTCGATATTCAAACAGATC | 4648 | GATCTGTTTGAATATCGAA |
| 1088 | TCGATATTCAAACAGATCC | 4649 | GGATCTGTTTGAATATCGA |
| 1089 | CGATATTCAAACAGATCCA | 4650 | TGGATCTGTTTGAATATCG |
| 1090 | GATATTCAAACAGATCCAC | 4651 | GTGGATCTGTTTGAATATC |
| 1091 | ATATTCAAACAGATCCACA | 4652 | TGTGGATCTGTTTGAATAT |
| 1092 | TATTCAAACAGATCCACAA | 4653 | TTGTGGATCTGTTTGAATA |
| 1093 | ATTCAAACAGATCCACAAA | 4654 | TTTGTGGATCTGTTTGAAT |
| 1094 | TTCAAACAGATCCACAAAC | 4655 | GTTTGTGGATCTGTTTGAA |
| 1095 | TCAAACAGATCCACAAACC | 4656 | GGTTTGTGGATCTGTTTGA |
| 1096 | CAAACAGATCCACAAACCA | 4657 | TGGTTTGTGGATCTGTTTG |
| 1097 | AAACAGATCCACAAACCAA | 4658 | TTGGTTTGTGGATCTGTTT |
| 1098 | AACAGATCCACAAACCAAT | 4659 | ATTGGTTTGTGGATCTGTT |
| 1099 | ACAGATCCACAAACCAATG | 4660 | CATTGGTTTGTGGATCTGT |
| 1100 | CAGATCCACAAACCAATGA | 4661 | TCATTGGTTTGTGGATCTG |
| 1101 | AGATCCACAAACCAATGAA | 4662 | TTCATTGGTTTGTGGATCT |
| 1102 | GATCCACAAACCAATGAAG | 4663 | CTTCATTGGTTTGTGGATC |
| 1103 | ATCCACAAACCAATGAAGG | 4664 | CCTTCATTGGTTTGTGGAT |
| 1104 | TCCACAAACCAATGAAGGC | 4665 | GCCTTCATTGGTTTGTGGA |
| 1105 | CCACAAACCAATGAAGGCA | 4666 | TGCCTTCATTGGTTTGTGG |
| 1106 | CACAAACCAATGAAGGCAT | 4667 | ATGCCTTCATTGGTTTGTG |
| 1107 | ACAAACCAATGAAGGCATT | 4668 | AATGCCTTCATTGGTTTGT |
| 1108 | CAAACCAATGAAGGCATTT | 4669 | AAATGCCTTCATTGGTTTG |
| 1109 | AAACCAATGAAGGCATTTT | 4670 | AAAATGCCTTCATTGGTTT |
| 1110 | AACCAATGAAGGCATTTTG | 4671 | CAAAATGCCTTCATTGGTT |
| 1111 | ACCAATGAAGGCATTTTGA | 4672 | TCAAAATGCCTTCATTGGT |
| 1112 | CCAATGAAGGCATTTTGAA | 4673 | TTCAAAATGCCTTCATTGG |
| 1113 | CAATGAAGGCATTTTGAAA | 4674 | TTTCAAAATGCCTTCATTG |
| 1114 | AATGAAGGCATTTTGAAAG | 4675 | CTTTCAAAATGCCTTCATT |
| 1115 | ATGAAGGCATTTTGAAAGT | 4676 | ACTTTCAAAATGCCTTCAT |
| 1116 | TGAAGGCATTTTGAAAGTT | 4677 | AACTTTCAAAATGCCTTCA |
| 1117 | GAAGGCATTTTGAAAGTTG | 4678 | CAACTTTCAAAATGCCTTC |
| 1118 | AAGGCATTTTGAAAGTTGT | 4679 | ACAACTTTCAAAATGCCTT |
| 1119 | AGGCATTTTGAAAGTTGTC | 4680 | GACAACTTTCAAAATGCCT |
| 1120 | GGCATTTTGAAAGTTGTCA | 4681 | TGACAACTTTCAAAATGCC |
| 1121 | GCATTTTGAAAGTTGTCAA | 4682 | TTGACAACTTTCAAAATGC |
| 1122 | CATTTTGAAAGTTGTCAAG | 4683 | CTTGACAACTTTCAAAATG |
| 1123 | ATTTTGAAAGTTGTCAAGA | 4684 | TCTTGACAACTTTCAAAAT |
| 1124 | TTTTGAAAGTTGTCAAGAT | 4685 | ATCTTGACAACTTTCAAAA |
| 1125 | TTTGAAAGTTGTCAAGATG | 4686 | CATCTTGACAACTTTCAAA |
| 1126 | TTGAAAGTTGTCAAGATGC | 4687 | GCATCTTGACAACTTTCAA |
| 1127 | TGAAAGTTGTCAAGATGCT | 4688 | AGCATCTTGACAACTTTCA |
| 1128 | GAAAGTTGTCAAGATGCTG | 4689 | CAGCATCTTGACAACTTTC |
| 1129 | AAAGTTGTCAAGATGCTGG | 4690 | CCAGCATCTTGACAACTTT |
| 1130 | AAGTTGTCAAGATGCTGGA | 4691 | TCCAGCATCTTGACAACTT |
| 1131 | AGTTGTCAAGATGCTGGAT | 4692 | ATCCAGCATCTTGACAACT |
| 1132 | GTTGTCAAGATGCTGGATT | 4693 | AATCCAGCATCTTGACAAC |
| 1133 | TTGTCAAGATGCTGGATTA | 4694 | TAATCCAGCATCTTGACAA |
| 1134 | TGTCAAGATGCTGGATTAT | 4695 | ATAATCCAGCATCTTGACA |
| 1135 | GTCAAGATGCTGGATTATG | 4696 | CATAATCCAGCATCTTGAC |
| 1136 | TCAAGATGCTGGATTATGA | 4697 | TCATAATCCAGCATCTTGA |
| 1137 | CAAGATGCTGGATTATGAA | 4698 | TTCATAATCCAGCATCTTG |
| 1138 | AAGATGCTGGATTATGAAC | 4699 | GTTCATAATCCAGCATCTT |
| 1139 | AGATGCTGGATTATGAACA | 4700 | TGTTCATAATCCAGCATCT |
| 1140 | GATGCTGGATTATGAACAA | 4701 | TTGTTCATAATCCAGCATC |
| 1141 | ATGCTGGATTATGAACAAG | 4702 | CTTGTTCATAATCCAGCAT |
| 1142 | TGCTGGATTATGAACAAGC | 4703 | GCTTGTTCATAATCCAGCA |
| 1143 | GCTGGATTATGAACAAGCA | 4704 | TGCTTGTTCATAATCCAGC |
| 1144 | CTGGATTATGAACAAGCAC | 4705 | GTGCTTGTTCATAATCCAG |
| 1145 | TGGATTATGAACAAGCACC | 4706 | GGTGCTTGTTCATAATCCA |
| 1146 | GGATTATGAACAAGCACCT | 4707 | AGGTGCTTGTTCATAATCC |
| 1147 | GATTATGAACAAGCACCTA | 4708 | TAGGTGCTTGTTCATAATC |
| 1148 | ATTATGAACAAGCACCTAA | 4709 | TTAGGTGCTTGTTCATAAT |
| 1149 | TTATGAACAAGCACCTAAC | 4710 | GTTAGGTGCTTGTTCATAA |
| 1150 | TATGAACAAGCACCTAACA | 4711 | TGTTAGGTGCTTGTTCATA |
| 1151 | ATGAACAAGCACCTAACAT | 4712 | ATGTTAGGTGCTTGTTCAT |
| 1152 | TGAACAAGCACCTAACATT | 4713 | AATGTTAGGTGCTTGTTCA |
| 1153 | GAACAAGCACCTAACATTC | 4714 | GAATGTTAGGTGCTTGTTC |
| 1154 | AACAAGCACCTAACATTCA | 4715 | TGAATGTTAGGTGCTTGTT |
| 1155 | ACAAGCACCTAACATTCAG | 4716 | CTGAATGTTAGGTGCTTGT |
| 1156 | CAAGCACCTAACATTCAGC | 4717 | GCTGAATGTTAGGTGCTTG |
| 1157 | AAGCACCTAACATTCAGCT | 4718 | AGCTGAATGTTAGGTGCTT |
| 1158 | AGCACCTAACATTCAGCTT | 4719 | AAGCTGAATGTTAGGTGCT |
| 1159 | GCACCTAACATTCAGCTTA | 4720 | TAAGCTGAATGTTAGGTGC |
| 1160 | CACCTAACATTCAGCTTAG | 4721 | CTAAGCTGAATGTTAGGTG |
| 1161 | ACCTAACATTCAGCTTAGT | 4722 | ACTAAGCTGAATGTTAGGT |
| 1162 | CCTAACATTCAGCTTAGTA | 4723 | TACTAAGCTGAATGTTAGG |
| 1163 | CTAACATTCAGCTTAGTAT | 4724 | ATACTAAGCTGAATGTTAG |
| 1164 | TAACATTCAGCTTAGTATC | 4725 | GATACTAAGCTGAATGTTA |
| 1165 | AACATTCAGCTTAGTATCG | 4726 | CGATACTAAGCTGAATGTT |
| 1166 | ACATTCAGCTTAGTATCGG | 4727 | CCGATACTAAGCTGAATGT |
| 1167 | CATTCAGCTTAGTATCGGA | 4728 | TCCGATACTAAGCTGAATG |
| 1168 | ATTCAGCTTAGTATCGGAG | 4729 | CTCCGATACTAAGCTGAAT |
| 1169 | TTCAGCTTAGTATCGGAGT | 4730 | ACTCCGATACTAAGCTGAA |
| 1170 | TCAGCTTAGTATCGGAGTT | 4731 | AACTCCGATACTAAGCTGA |
| 1171 | CAGCTTAGTATCGGAGTTA | 4732 | TAACTCCGATACTAAGCTG |
| 1172 | AGCTTAGTATCGGAGTTAA | 4733 | TTAACTCCGATACTAAGCT |
| 1173 | GCTTAGTATCGGAGTTAAA | 4734 | TTTAACTCCGATACTAAGC |
| 1174 | CTTAGTATCGGAGTTAAAA | 4735 | TTTTAACTCCGATACTAAG |
| 1175 | TTAGTATCGGAGTTAAAAA | 4736 | TTTTTAACTCCGATACTAA |
| 1176 | TAGTATCGGAGTTAAAAAC | 4737 | GTTTTTAACTCCGATACTA |
| 1177 | AGTATCGGAGTTAAAAACC | 4738 | GGTTTTTAACTCCGATACT |
| 1178 | GTATCGGAGTTAAAAACCA | 4739 | TGGTTTTTAACTCCGATAC |
| 1179 | TATCGGAGTTAAAAACCAA | 4740 | TTGGTTTTTAACTCCGATA |
| 1180 | ATCGGAGTTAAAAACCAAG | 4741 | CTTGGTTTTTAACTCCGAT |
| 1181 | TCGGAGTTAAAAACCAAGC | 4742 | GCTTGGTTTTTAACTCCGA |
| 1182 | CGGAGTTAAAAACCAAGCT | 4743 | AGCTTGGTTTTTAACTCCG |
| 1183 | GGAGTTAAAAACCAAGCTG | 4744 | CAGCTTGGTTTTTAACTCC |
| 1184 | GAGTTAAAAACCAAGCTGA | 4745 | TCAGCTTGGTTTTTAACTC |
| 1185 | AGTTAAAAACCAAGCTGAT | 4746 | ATCAGCTTGGTTTTTAACT |
| 1186 | GTTAAAAACCAAGCTGATT | 4747 | AATCAGCTTGGTTTTTAAC |
| 1187 | TTAAAAACCAAGCTGATTT | 4748 | AAATCAGCTTGGTTTTTAA |
| 1188 | TAAAAACCAAGCTGATTTT | 4749 | AAAATCAGCTTGGTTTTTA |
| 1189 | AAAAACCAAGCTGATTTTC | 4750 | GAAAATCAGCTTGGTTTTT |
| 1190 | AAAACCAAGCTGATTTTCA | 4751 | TGAAAATCAGCTTGGTTTT |
| 1191 | AAACCAAGCTGATTTTCAC | 4752 | GTGAAAATCAGCTTGGTTT |
| 1192 | AACCAAGCTGATTTTCACT | 4753 | AGTGAAAATCAGCTTGGTT |
| 1193 | ACCAAGCTGATTTTCACTA | 4754 | TAGTGAAAATCAGCTTGGT |
| 1194 | CCAAGCTGATTTTCACTAC | 4755 | GTAGTGAAAATCAGCTTGG |
| 1195 | CAAGCTGATTTTCACTACT | 4756 | AGTAGTGAAAATCAGCTTG |
| 1196 | AAGCTGATTTTCACTACTC | 4757 | GAGTAGTGAAAATCAGCTT |
| 1197 | AGCTGATTTTCACTACTCC | 4758 | GGAGTAGTGAAAATCAGCT |
| 1198 | GCTGATTTTCACTACTCCG | 4759 | CGGAGTAGTGAAAATCAGC |
| 1199 | CTGATTTTCACTACTCCGT | 4760 | ACGGAGTAGTGAAAATCAG |
| 1200 | TGATTTTCACTACTCCGTT | 4761 | AACGGAGTAGTGAAAATCA |
| 1201 | GATTTTCACTACTCCGTTG | 4762 | CAACGGAGTAGTGAAAATC |
| 1202 | ATTTTCACTACTCCGTTGC | 4763 | GCAACGGAGTAGTGAAAAT |
| 1203 | TTTTCACTACTCCGTTGCT | 4764 | AGCAACGGAGTAGTGAAAA |
| 1204 | TTTCACTACTCCGTTGCTT | 4765 | AAGCAACGGAGTAGTGAAA |
| 1205 | TTCACTACTCCGTTGCTTC | 4766 | GAAGCAACGGAGTAGTGAA |
| 1206 | TCACTACTCCGTTGCTTCT | 4767 | AGAAGCAACGGAGTAGTGA |
| 1207 | CACTACTCCGTTGCTTCTC | 4768 | GAGAAGCAACGGAGTAGTG |
| 1208 | ACTACTCCGTTGCTTCTCA | 4769 | TGAGAAGCAACGGAGTAGT |
| 1209 | CTACTCCGTTGCTTCTCAA | 4770 | TTGAGAAGCAACGGAGTAG |
| 1210 | TACTCCGTTGCTTCTCAAT | 4771 | ATTGAGAAGCAACGGAGTA |
| 1211 | ACTCCGTTGCTTCTCAATT | 4772 | AATTGAGAAGCAACGGAGT |
| 1212 | CTCCGTTGCTTCTCAATTC | 4773 | GAATTGAGAAGCAACGGAG |
| 1213 | TCCGTTGCTTCTCAATTCC | 4774 | GGAATTGAGAAGCAACGGA |
| 1214 | CCGTTGCTTCTCAATTCCA | 4775 | TGGAATTGAGAAGCAACGG |
| 1215 | CGTTGCTTCTCAATTCCAA | 4776 | TTGGAATTGAGAAGCAACG |
| 1216 | GTTGCTTCTCAATTCCAAA | 4777 | TTTGGAATTGAGAAGCAAC |
| 1217 | TTGCTTCTCAATTCCAAAT | 4778 | ATTTGGAATTGAGAAGCAA |
| 1218 | TGCTTCTCAATTCCAAATG | 4779 | CATTTGGAATTGAGAAGCA |
| 1219 | GCTTCTCAATTCCAAATGC | 4780 | GCATTTGGAATTGAGAAGC |
| 1220 | CTTCTCAATTCCAAATGCA | 4781 | TGCATTTGGAATTGAGAAG |
| 1221 | TTCTCAATTCCAAATGCAC | 4782 | GTGCATTTGGAATTGAGAA |
| 1222 | TCTCAATTCCAAATGCACC | 4783 | GGTGCATTTGGAATTGAGA |
| 1223 | CTCAATTCCAAATGCACCC | 4784 | GGGTGCATTTGGAATTGAG |
| 1224 | TCAATTCCAAATGCACCCA | 4785 | TGGGTGCATTTGGAATTGA |
| 1225 | CAATTCCAAATGCACCCAA | 4786 | TTGGGTGCATTTGGAATTG |
| 1226 | AATTCCAAATGCACCCAAC | 4787 | GTTGGGTGCATTTGGAATT |
| 1227 | ATTCCAAATGCACCCAACC | 4788 | GGTTGGGTGCATTTGGAAT |
| 1228 | TTCCAAATGCACCCAACCC | 4789 | GGGTTGGGTGCATTTGGAA |
| 1229 | TCCAAATGCACCCAACCCC | 4790 | GGGGTTGGGTGCATTTGGA |
| 1230 | CCAAATGCACCCAACCCCT | 4791 | AGGGGTTGGGTGCATTTGG |
| 1231 | CAAATGCACCCAACCCCTG | 4792 | CAGGGGTTGGGTGCATTTG |
| 1232 | AAATGCACCCAACCCCTGT | 4793 | ACAGGGGTTGGGTGCATTT |
| 1233 | AATGCACCCAACCCCTGTG | 4794 | CACAGGGGTTGGGTGCATT |
| 1234 | ATGCACCCAACCCCTGTGA | 4795 | TCACAGGGGTTGGGTGCAT |
| 1235 | TGCACCCAACCCCTGTGAG | 4796 | CTCACAGGGGTTGGGTGCA |
| 1236 | GCACCCAACCCCTGTGAGA | 4797 | TCTCACAGGGGTTGGGTGC |
| 1237 | CACCCAACCCCTGTGAGAA | 4798 | TTCTCACAGGGGTTGGGTG |
| 1238 | ACCCAACCCCTGTGAGAAT | 4799 | ATTCTCACAGGGGTTGGGT |
| 1239 | CCCAACCCCTGTGAGAATT | 4800 | AATTCTCACAGGGGTTGGG |
| 1240 | CCAACCCCTGTGAGAATTC | 4801 | GAATTCTCACAGGGGTTGG |
| 1241 | CAACCCCTGTGAGAATTCA | 4802 | TGAATTCTCACAGGGGTTG |
| 1242 | AACCCCTGTGAGAATTCAA | 4803 | TTGAATTCTCACAGGGGTT |
| 1243 | ACCCCTGTGAGAATTCAAG | 4804 | CTTGAATTCTCACAGGGGT |
| 1244 | CCCCTGTGAGAATTCAAGT | 4805 | ACTTGAATTCTCACAGGGG |
| 1245 | CCCTGTGAGAATTCAAGTT | 4806 | AACTTGAATTCTCACAGGG |
| 1246 | CCTGTGAGAATTCAAGTTG | 4807 | CAACTTGAATTCTCACAGG |
| 1247 | CTGTGAGAATTCAAGTTGT | 4808 | ACAACTTGAATTCTCACAG |
| 1248 | TGTGAGAATTCAAGTTGTT | 4809 | AACAACTTGAATTCTCACA |
| 1249 | GTGAGAATTCAAGTTGTTG | 4810 | CAACAACTTGAATTCTCAC |
| 1250 | TGAGAATTCAAGTTGTTGA | 4811 | TCAACAACTTGAATTCTCA |
| 1251 | GAGAATTCAAGTTGTTGAT | 4812 | ATCAACAACTTGAATTCTC |
| 1252 | AGAATTCAAGTTGTTGATG | 4813 | CATCAACAACTTGAATTCT |
| 1253 | GAATTCAAGTTGTTGATGT | 4814 | ACATCAACAACTTGAATTC |
| 1254 | AATTCAAGTTGTTGATGTG | 4815 | CACATCAACAACTTGAATT |
| 1255 | ATTCAAGTTGTTGATGTGA | 4816 | TCACATCAACAACTTGAAT |
| 1256 | TTCAAGTTGTTGATGTGAG | 4817 | CTCACATCAACAACTTGAA |
| 1257 | TCAAGTTGTTGATGTGAGA | 4818 | TCTCACATCAACAACTTGA |
| 1258 | CAAGTTGTTGATGTGAGAG | 4819 | CTCTCACATCAACAACTTG |
| 1259 | AAGTTGTTGATGTGAGAGA | 4820 | TCTCTCACATCAACAACTT |
| 1260 | AGTTGTTGATGTGAGAGAA | 4821 | TTCTCTCACATCAACAACT |
| 1261 | GTTGTTGATGTGAGAGAAG | 4822 | CTTCTCTCACATCAACAAC |
| 1262 | TTGTTGATGTGAGAGAAGG | 4823 | CCTTCTCTCACATCAACAA |
| 1263 | TGTTGATGTGAGAGAAGGA | 4824 | TCCTTCTCTCACATCAACA |
| 1264 | GTTGATGTGAGAGAAGGAC | 4825 | GTCCTTCTCTCACATCAAC |
| 1265 | TTGATGTGAGAGAAGGACC | 4826 | GGTCCTTCTCTCACATCAA |
| 1266 | TGATGTGAGAGAAGGACCT | 4827 | AGGTCCTTCTCTCACATCA |
| 1267 | GATGTGAGAGAAGGACCTG | 4828 | CAGGTCCTTCTCTCACATC |
| 1268 | ATGTGAGAGAAGGACCTGC | 4829 | GCAGGTCCTTCTCTCACAT |
| 1269 | TGTGAGAGAAGGACCTGCA | 4830 | TGCAGGTCCTTCTCTCACA |
| 1270 | GTGAGAGAAGGACCTGCAT | 4831 | ATGCAGGTCCTTCTCTCAC |
| 1271 | TGAGAGAAGGACCTGCATT | 4832 | AATGCAGGTCCTTCTCTCA |
| 1272 | GAGAGAAGGACCTGCATTT | 4833 | AAATGCAGGTCCTTCTCTC |
| 1273 | AGAGAAGGACCTGCATTTC | 4834 | GAAATGCAGGTCCTTCTCT |
| 1274 | GAGAAGGACCTGCATTTCA | 4835 | TGAAATGCAGGTCCTTCTC |
| 1275 | AGAAGGACCTGCATTTCAT | 4836 | ATGAAATGCAGGTCCTTCT |
| 1276 | GAAGGACCTGCATTTCATC | 4837 | GATGAAATGCAGGTCCTTC |
| 1277 | AAGGACCTGCATTTCATCC | 4838 | GGATGAAATGCAGGTCCTT |
| 1278 | AGGACCTGCATTTCATCCA | 4839 | TGGATGAAATGCAGGTCCT |
| 1279 | GGACCTGCATTTCATCCAA | 4840 | TTGGATGAAATGCAGGTCC |
| 1280 | GACCTGCATTTCATCCAAG | 4841 | CTTGGATGAAATGCAGGTC |
| 1281 | ACCTGCATTTCATCCAAGT | 4842 | ACTTGGATGAAATGCAGGT |
| 1282 | CCTGCATTTCATCCAAGTA | 4843 | TACTTGGATGAAATGCAGG |
| 1283 | CTGCATTTCATCCAAGTAC | 4844 | GTACTTGGATGAAATGCAG |
| 1284 | TGCATTTCATCCAAGTACT | 4845 | AGTACTTGGATGAAATGCA |
| 1285 | GCATTTCATCCAAGTACTA | 4846 | TAGTACTTGGATGAAATGC |
| 1286 | CATTTCATCCAAGTACTAT | 4847 | ATAGTACTTGGATGAAATG |
| 1287 | ATTTCATCCAAGTACTATG | 4848 | CATAGTACTTGGATGAAAT |
| 1288 | TTTCATCCAAGTACTATGG | 4849 | CCATAGTACTTGGATGAAA |
| 1289 | TTCATCCAAGTACTATGGC | 4850 | GCCATAGTACTTGGATGAA |
| 1290 | TCATCCAAGTACTATGGCT | 4851 | AGCCATAGTACTTGGATGA |
| 1291 | CATCCAAGTACTATGGCTT | 4852 | AAGCCATAGTACTTGGATG |
| 1292 | ATCCAAGTACTATGGCTTT | 4853 | AAAGCCATAGTACTTGGAT |
| 1293 | TCCAAGTACTATGGCTTTT | 4854 | AAAAGCCATAGTACTTGGA |
| 1294 | CCAAGTACTATGGCTTTTA | 4855 | TAAAAGCCATAGTACTTGG |
| 1295 | CAAGTACTATGGCTTTTAG | 4856 | CTAAAAGCCATAGTACTTG |
| 1296 | AAGTACTATGGCTTTTAGT | 4857 | ACTAAAAGCCATAGTACTT |
| 1297 | AGTACTATGGCTTTTAGTG | 4858 | CACTAAAAGCCATAGTACT |
| 1298 | GTACTATGGCTTTTAGTGT | 4859 | ACACTAAAAGCCATAGTAC |
| 1299 | TACTATGGCTTTTAGTGTG | 4860 | CACACTAAAAGCCATAGTA |
| 1300 | ACTATGGCTTTTAGTGTGC | 4861 | GCACACTAAAAGCCATAGT |
| 1301 | CTATGGCTTTTAGTGTGCG | 4862 | CGCACACTAAAAGCCATAG |
| 1302 | TATGGCTTTTAGTGTGCGG | 4863 | CCGCACACTAAAAGCCATA |
| 1303 | ATGGCTTTTAGTGTGCGGG | 4864 | CCCGCACACTAAAAGCCAT |
| 1304 | TGGCTTTTAGTGTGCGGGA | 4865 | TCCCGCACACTAAAAGCCA |
| 1305 | GGCTTTTAGTGTGCGGGAA | 4866 | TTCCCGCACACTAAAAGCC |
| 1306 | GCTTTTAGTGTGCGGGAAG | 4867 | CTTCCCGCACACTAAAAGC |
| 1307 | CTTTTAGTGTGCGGGAAGG | 4868 | CCTTCCCGCACACTAAAAG |
| 1308 | TTTTAGTGTGCGGGAAGGA | 4869 | TCCTTCCCGCACACTAAAA |
| 1309 | TTTAGTGTGCGGGAAGGAA | 4870 | TTCCTTCCCGCACACTAAA |
| 1310 | TTAGTGTGCGGGAAGGAAT | 4871 | ATTCCTTCCCGCACACTAA |
| 1311 | TAGTGTGCGGGAAGGAATA | 4872 | TATTCCTTCCCGCACACTA |
| 1312 | AGTGTGCGGGAAGGAATAA | 4873 | TTATTCCTTCCCGCACACT |
| 1313 | GTGTGCGGGAAGGAATAAA | 4874 | TTTATTCCTTCCCGCACAC |
| 1314 | TGTGCGGGAAGGAATAAAA | 4875 | TTTTATTCCTTCCCGCACA |
| 1315 | GTGCGGGAAGGAATAAAAG | 4876 | CTTTTATTCCTTCCCGCAC |
| 1316 | TGCGGGAAGGAATAAAAGG | 4877 | CCTTTTATTCCTTCCCGCA |
| 1317 | GCGGGAAGGAATAAAAGGA | 4878 | TCCTTTTATTCCTTCCCGC |
| 1318 | CGGGAAGGAATAAAAGGAA | 4879 | TTCCTTTTATTCCTTCCCG |
| 1319 | GGGAAGGAATAAAAGGAAG | 4880 | CTTCCTTTTATTCCTTCCC |
| 1320 | GGAAGGAATAAAAGGAAGT | 4881 | ACTTCCTTTTATTCCTTCC |
| 1321 | GAAGGAATAAAAGGAAGTT | 4882 | AACTTCCTTTTATTCCTTC |
| 1322 | AAGGAATAAAAGGAAGTTC | 4883 | GAACTTCCTTTTATTCCTT |
| 1323 | AGGAATAAAAGGAAGTTCC | 4884 | GGAACTTCCTTTTATTCCT |
| 1324 | GGAATAAAAGGAAGTTCCT | 4885 | AGGAACTTCCTTTTATTCC |
| 1325 | GAATAAAAGGAAGTTCCTT | 4886 | AAGGAACTTCCTTTTATTC |
| 1326 | AATAAAAGGAAGTTCCTTA | 4887 | TAAGGAACTTCCTTTTATT |
| 1327 | ATAAAAGGAAGTTCCTTAT | 4888 | ATAAGGAACTTCCTTTTAT |
| 1328 | TAAAAGGAAGTTCCTTATT | 4889 | AATAAGGAACTTCCTTTTA |
| 1329 | AAAAGGAAGTTCCTTATTG | 4890 | CAATAAGGAACTTCCTTTT |
| 1330 | AAAGGAAGTTCCTTATTGA | 4891 | TCAATAAGGAACTTCCTTT |
| 1331 | AAGGAAGTTCCTTATTGAA | 4892 | TTCAATAAGGAACTTCCTT |
| 1332 | AGGAAGTTCCTTATTGAAT | 4893 | ATTCAATAAGGAACTTCCT |
| 1333 | GGAAGTTCCTTATTGAATT | 4894 | AATTCAATAAGGAACTTCC |
| 1334 | GAAGTTCCTTATTGAATTA | 4895 | TAATTCAATAAGGAACTTC |
| 1335 | AAGTTCCTTATTGAATTAT | 4896 | ATAATTCAATAAGGAACTT |
| 1336 | AGTTCCTTATTGAATTATG | 4897 | CATAATTCAATAAGGAACT |
| 1337 | GTTCCTTATTGAATTATGT | 4898 | ACATAATTCAATAAGGAAC |
| 1338 | TTCCTTATTGAATTATGTG | 4899 | CACATAATTCAATAAGGAA |
| 1339 | TCCTTATTGAATTATGTGC | 4900 | GCACATAATTCAATAAGGA |
| 1340 | CCTTATTGAATTATGTGCT | 4901 | AGCACATAATTCAATAAGG |
| 1341 | CTTATTGAATTATGTGCTT | 4902 | AAGCACATAATTCAATAAG |
| 1342 | TTATTGAATTATGTGCTTG | 4903 | CAAGCACATAATTCAATAA |
| 1343 | TATTGAATTATGTGCTTGG | 4904 | CCAAGCACATAATTCAATA |
| 1344 | ATTGAATTATGTGCTTGGC | 4905 | GCCAAGCACATAATTCAAT |
| 1345 | TTGAATTATGTGCTTGGCA | 4906 | TGCCAAGCACATAATTCAA |
| 1346 | TGAATTATGTGCTTGGCAC | 4907 | GTGCCAAGCACATAATTCA |
| 1347 | GAATTATGTGCTTGGCACA | 4908 | TGTGCCAAGCACATAATTC |
| 1348 | AATTATGTGCTTGGCACAT | 4909 | ATGTGCCAAGCACATAATT |
| 1349 | ATTATGTGCTTGGCACATA | 4910 | TATGTGCCAAGCACATAAT |
| 1350 | TTATGTGCTTGGCACATAT | 4911 | ATATGTGCCAAGCACATAA |
| 1351 | TATGTGCTTGGCACATATA | 4912 | TATATGTGCCAAGCACATA |
| 1352 | ATGTGCTTGGCACATATAC | 4913 | GTATATGTGCCAAGCACAT |
| 1353 | TGTGCTTGGCACATATACA | 4914 | TGTATATGTGCCAAGCACA |
| 1354 | GTGCTTGGCACATATACAG | 4915 | CTGTATATGTGCCAAGCAC |
| 1355 | TGCTTGGCACATATACAGC | 4916 | GCTGTATATGTGCCAAGCA |
| 1356 | GCTTGGCACATATACAGCC | 4917 | GGCTGTATATGTGCCAAGC |
| 1357 | CTTGGCACATATACAGCCA | 4918 | TGGCTGTATATGTGCCAAG |
| 1358 | TTGGCACATATACAGCCAT | 4919 | ATGGCTGTATATGTGCCAA |
| 1359 | TGGCACATATACAGCCATA | 4920 | TATGGCTGTATATGTGCCA |
| 1360 | GGCACATATACAGCCATAG | 4921 | CTATGGCTGTATATGTGCC |
| 1361 | GCACATATACAGCCATAGA | 4922 | TCTATGGCTGTATATGTGC |
| 1362 | CACATATACAGCCATAGAT | 4923 | ATCTATGGCTGTATATGTG |
| 1363 | ACATATACAGCCATAGATT | 4924 | AATCTATGGCTGTATATGT |
| 1364 | CATATACAGCCATAGATTT | 4925 | AAATCTATGGCTGTATATG |
| 1365 | ATATACAGCCATAGATTTG | 4926 | CAAATCTATGGCTGTATAT |
| 1366 | TATACAGCCATAGATTTGG | 4927 | CCAAATCTATGGCTGTATA |
| 1367 | ATACAGCCATAGATTTGGA | 4928 | TCCAAATCTATGGCTGTAT |
| 1368 | TACAGCCATAGATTTGGAC | 4929 | GTCCAAATCTATGGCTGTA |
| 1369 | ACAGCCATAGATTTGGACA | 4930 | TGTCCAAATCTATGGCTGT |
| 1370 | CAGCCATAGATTTGGACAC | 4931 | GTGTCCAAATCTATGGCTG |
| 1371 | AGCCATAGATTTGGACACA | 4932 | TGTGTCCAAATCTATGGCT |
| 1372 | GCCATAGATTTGGACACAG | 4933 | CTGTGTCCAAATCTATGGC |
| 1373 | CCATAGATTTGGACACAGG | 4934 | CCTGTGTCCAAATCTATGG |
| 1374 | CATAGATTTGGACACAGGA | 4935 | TCCTGTGTCCAAATCTATG |
| 1375 | ATAGATTTGGACACAGGAA | 4936 | TTCCTGTGTCCAAATCTAT |
| 1376 | TAGATTTGGACACAGGAAA | 4937 | TTTCCTGTGTCCAAATCTA |
| 1377 | AGATTTGGACACAGGAAAC | 4938 | GTTTCCTGTGTCCAAATCT |
| 1378 | GATTTGGACACAGGAAACC | 4939 | GGTTTCCTGTGTCCAAATC |
| 1379 | ATTTGGACACAGGAAACCC | 4940 | GGGTTTCCTGTGTCCAAAT |
| 1380 | TTTGGACACAGGAAACCCT | 4941 | AGGGTTTCCTGTGTCCAAA |
| 1381 | TTGGACACAGGAAACCCTG | 4942 | CAGGGTTTCCTGTGTCCAA |
| 1382 | TGGACACAGGAAACCCTGC | 4943 | GCAGGGTTTCCTGTGTCCA |
| 1383 | GGACACAGGAAACCCTGCA | 4944 | TGCAGGGTTTCCTGTGTCC |
| 1384 | GACACAGGAAACCCTGCAA | 4945 | TTGCAGGGTTTCCTGTGTC |
| 1385 | ACACAGGAAACCCTGCAAC | 4946 | GTTGCAGGGTTTCCTGTGT |
| 1386 | CACAGGAAACCCTGCAACA | 4947 | TGTTGCAGGGTTTCCTGTG |
| 1387 | ACAGGAAACCCTGCAACAG | 4948 | CTGTTGCAGGGTTTCCTGT |
| 1388 | CAGGAAACCCTGCAACAGA | 4949 | TCTGTTGCAGGGTTTCCTG |
| 1389 | AGGAAACCCTGCAACAGAT | 4950 | ATCTGTTGCAGGGTTTCCT |
| 1390 | GGAAACCCTGCAACAGATG | 4951 | CATCTGTTGCAGGGTTTCC |
| 1391 | GAAACCCTGCAACAGATGT | 4952 | ACATCTGTTGCAGGGTTTC |
| 1392 | AAACCCTGCAACAGATGTC | 4953 | GACATCTGTTGCAGGGTTT |
| 1393 | AACCCTGCAACAGATGTCA | 4954 | TGACATCTGTTGCAGGGTT |
| 1394 | ACCCTGCAACAGATGTCAG | 4955 | CTGACATCTGTTGCAGGGT |
| 1395 | CCCTGCAACAGATGTCAGA | 4956 | TCTGACATCTGTTGCAGGG |
| 1396 | CCTGCAACAGATGTCAGAT | 4957 | ATCTGACATCTGTTGCAGG |
| 1397 | CTGCAACAGATGTCAGATA | 4958 | TATCTGACATCTGTTGCAG |
| 1398 | TGCAACAGATGTCAGATAT | 4959 | ATATCTGACATCTGTTGCA |
| 1399 | GCAACAGATGTCAGATATA | 4960 | TATATCTGACATCTGTTGC |
| 1400 | CAACAGATGTCAGATATAT | 4961 | ATATATCTGACATCTGTTG |
| 1401 | AACAGATGTCAGATATATC | 4962 | GATATATCTGACATCTGTT |
| 1402 | ACAGATGTCAGATATATCA | 4963 | TGATATATCTGACATCTGT |
| 1403 | CAGATGTCAGATATATCAT | 4964 | ATGATATATCTGACATCTG |
| 1404 | AGATGTCAGATATATCATA | 4965 | TATGATATATCTGACATCT |
| 1405 | GATGTCAGATATATCATAG | 4966 | CTATGATATATCTGACATC |
| 1406 | ATGTCAGATATATCATAGG | 4967 | CCTATGATATATCTGACAT |
| 1407 | TGTCAGATATATCATAGGG | 4968 | CCCTATGATATATCTGACA |
| 1408 | GTCAGATATATCATAGGGC | 4969 | GCCCTATGATATATCTGAC |
| 1409 | TCAGATATATCATAGGGCA | 4970 | TGCCCTATGATATATCTGA |
| 1410 | CAGATATATCATAGGGCAT | 4971 | ATGCCCTATGATATATCTG |
| 1411 | AGATATATCATAGGGCATG | 4972 | CATGCCCTATGATATATCT |
| 1412 | GATATATCATAGGGCATGA | 4973 | TCATGCCCTATGATATATC |
| 1413 | ATATATCATAGGGCATGAT | 4974 | ATCATGCCCTATGATATAT |
| 1414 | TATATCATAGGGCATGATG | 4975 | CATCATGCCCTATGATATA |
| 1415 | ATATCATAGGGCATGATGC | 4976 | GCATCATGCCCTATGATAT |
| 1416 | TATCATAGGGCATGATGCA | 4977 | TGCATCATGCCCTATGATA |
| 1417 | ATCATAGGGCATGATGCAG | 4978 | CTGCATCATGCCCTATGAT |
| 1418 | TCATAGGGCATGATGCAGG | 4979 | CCTGCATCATGCCCTATGA |
| 1419 | CATAGGGCATGATGCAGGC | 4980 | GCCTGCATCATGCCCTATG |
| 1420 | ATAGGGCATGATGCAGGCA | 4981 | TGCCTGCATCATGCCCTAT |
| 1421 | TAGGGCATGATGCAGGCAG | 4982 | CTGCCTGCATCATGCCCTA |
| 1422 | AGGGCATGATGCAGGCAGC | 4983 | GCTGCCTGCATCATGCCCT |
| 1423 | GGGCATGATGCAGGCAGCT | 4984 | AGCTGCCTGCATCATGCCC |
| 1424 | GGCATGATGCAGGCAGCTG | 4985 | CAGCTGCCTGCATCATGCC |
| 1425 | GCATGATGCAGGCAGCTGG | 4986 | CCAGCTGCCTGCATCATGC |
| 1426 | CATGATGCAGGCAGCTGGT | 4987 | ACCAGCTGCCTGCATCATG |
| 1427 | ATGATGCAGGCAGCTGGTT | 4988 | AACCAGCTGCCTGCATCAT |
| 1428 | TGATGCAGGCAGCTGGTTA | 4989 | TAACCAGCTGCCTGCATCA |
| 1429 | GATGCAGGCAGCTGGTTAA | 4990 | TTAACCAGCTGCCTGCATC |
| 1430 | ATGCAGGCAGCTGGTTAAA | 4991 | TTTAACCAGCTGCCTGCAT |
| 1431 | TGCAGGCAGCTGGTTAAAA | 4992 | TTTTAACCAGCTGCCTGCA |
| 1432 | GCAGGCAGCTGGTTAAAAA | 4993 | TTTTTAACCAGCTGCCTGC |
| 1433 | CAGGCAGCTGGTTAAAAAT | 4994 | ATTTTTAACCAGCTGCCTG |
| 1434 | AGGCAGCTGGTTAAAAATT | 4995 | AATTTTTAACCAGCTGCCT |
| 1435 | GGCAGCTGGTTAAAAATTG | 4996 | CAATTTTTAACCAGCTGCC |
| 1436 | GCAGCTGGTTAAAAATTGA | 4997 | TCAATTTTTAACCAGCTGC |
| 1437 | CAGCTGGTTAAAAATTGAT | 4998 | ATCAATTTTTAACCAGCTG |
| 1438 | AGCTGGTTAAAAATTGATT | 4999 | AATCAATTTTTAACCAGCT |
| 1439 | GCTGGTTAAAAATTGATTC | 5000 | GAATCAATTTTTAACCAGC |
| 1440 | CTGGTTAAAAATTGATTCA | 5001 | TGAATCAATTTTTAACCAG |
| 1441 | TGGTTAAAAATTGATTCAA | 5002 | TTGAATCAATTTTTAACCA |
| 1442 | GGTTAAAAATTGATTCAAG | 5003 | CTTGAATCAATTTTTAACC |
| 1443 | GTTAAAAATTGATTCAAGA | 5004 | TCTTGAATCAATTTTTAAC |
| 1444 | TTAAAAATTGATTCAAGAA | 5005 | TTCTTGAATCAATTTTTAA |
| 1445 | TAAAAATTGATTCAAGAAC | 5006 | GTTCTTGAATCAATTTTTA |
| 1446 | AAAAATTGATTCAAGAACT | 5007 | AGTTCTTGAATCAATTTTT |
| 1447 | AAAATTGATTCAAGAACTG | 5008 | CAGTTCTTGAATCAATTTT |
| 1448 | AAATTGATTCAAGAACTGG | 5009 | CCAGTTCTTGAATCAATTT |
| 1449 | AATTGATTCAAGAACTGGT | 5010 | ACCAGTTCTTGAATCAATT |
| 1450 | ATTGATTCAAGAACTGGTG | 5011 | CACCAGTTCTTGAATCAAT |
| 1451 | TTGATTCAAGAACTGGTGA | 5012 | TCACCAGTTCTTGAATCAA |
| 1452 | TGATTCAAGAACTGGTGAG | 5013 | CTCACCAGTTCTTGAATCA |
| 1453 | GATTCAAGAACTGGTGAGA | 5014 | TCTCACCAGTTCTTGAATC |
| 1454 | ATTCAAGAACTGGTGAGAT | 5015 | ATCTCACCAGTTCTTGAAT |
| 1455 | TTCAAGAACTGGTGAGATA | 5016 | TATCTCACCAGTTCTTGAA |
| 1456 | TCAAGAACTGGTGAGATAC | 5017 | GTATCTCACCAGTTCTTGA |
| 1457 | CAAGAACTGGTGAGATACA | 5018 | TGTATCTCACCAGTTCTTG |
| 1458 | AAGAACTGGTGAGATACAA | 5019 | TTGTATCTCACCAGTTCTT |
| 1459 | AGAACTGGTGAGATACAAT | 5020 | ATTGTATCTCACCAGTTCT |
| 1460 | GAACTGGTGAGATACAATT | 5021 | AATTGTATCTCACCAGTTC |
| 1461 | AACTGGTGAGATACAATTT | 5022 | AAATTGTATCTCACCAGTT |
| 1462 | ACTGGTGAGATACAATTTT | 5023 | AAAATTGTATCTCACCAGT |
| 1463 | CTGGTGAGATACAATTTTC | 5024 | GAAAATTGTATCTCACCAG |
| 1464 | TGGTGAGATACAATTTTCT | 5025 | AGAAAATTGTATCTCACCA |
| 1465 | GGTGAGATACAATTTTCTA | 5026 | TAGAAAATTGTATCTCACC |
| 1466 | GTGAGATACAATTTTCTAG | 5027 | CTAGAAAATTGTATCTCAC |
| 1467 | TGAGATACAATTTTCTAGA | 5028 | TCTAGAAAATTGTATCTCA |
| 1468 | GAGATACAATTTTCTAGAG | 5029 | CTCTAGAAAATTGTATCTC |
| 1469 | AGATACAATTTTCTAGAGA | 5030 | TCTCTAGAAAATTGTATCT |
| 1470 | GATACAATTTTCTAGAGAA | 5031 | TTCTCTAGAAAATTGTATC |
| 1471 | ATACAATTTTCTAGAGAAT | 5032 | ATTCTCTAGAAAATTGTAT |
| 1472 | TACAATTTTCTAGAGAATT | 5033 | AATTCTCTAGAAAATTGTA |
| 1473 | ACAATTTTCTAGAGAATTT | 5034 | AAATTCTCTAGAAAATTGT |
| 1474 | CAATTTTCTAGAGAATTTG | 5035 | CAAATTCTCTAGAAAATTG |
| 1475 | AATTTTCTAGAGAATTTGA | 5036 | TCAAATTCTCTAGAAAATT |
| 1476 | ATTTTCTAGAGAATTTGAT | 5037 | ATCAAATTCTCTAGAAAAT |
| 1477 | TTTTCTAGAGAATTTGATA | 5038 | TATCAAATTCTCTAGAAAA |
| 1478 | TTTCTAGAGAATTTGATAA | 5039 | TTATCAAATTCTCTAGAAA |
| 1479 | TTCTAGAGAATTTGATAAG | 5040 | CTTATCAAATTCTCTAGAA |
| 1480 | TCTAGAGAATTTGATAAGA | 5041 | TCTTATCAAATTCTCTAGA |
| 1481 | CTAGAGAATTTGATAAGAA | 5042 | TTCTTATCAAATTCTCTAG |
| 1482 | TAGAGAATTTGATAAGAAG | 5043 | CTTCTTATCAAATTCTCTA |
| 1483 | AGAGAATTTGATAAGAAGT | 5044 | ACTTCTTATCAAATTCTCT |
| 1484 | GAGAATTTGATAAGAAGTC | 5045 | GACTTCTTATCAAATTCTC |
| 1485 | AGAATTTGATAAGAAGTCA | 5046 | TGACTTCTTATCAAATTCT |
| 1486 | GAATTTGATAAGAAGTCAA | 5047 | TTGACTTCTTATCAAATTC |
| 1487 | AATTTGATAAGAAGTCAAA | 5048 | TTTGACTTCTTATCAAATT |
| 1488 | ATTTGATAAGAAGTCAAAA | 5049 | TTTTGACTTCTTATCAAAT |
| 1489 | TTTGATAAGAAGTCAAAAT | 5050 | ATTTTGACTTCTTATCAAA |
| 1490 | TTGATAAGAAGTCAAAATA | 5051 | TATTTTGACTTCTTATCAA |
| 1491 | TGATAAGAAGTCAAAATAT | 5052 | ATATTTTGACTTCTTATCA |
| 1492 | GATAAGAAGTCAAAATATA | 5053 | TATATTTTGACTTCTTATC |
| 1493 | ATAAGAAGTCAAAATATAT | 5054 | ATATATTTTGACTTCTTAT |
| 1494 | TAAGAAGTCAAAATATATT | 5055 | AATATATTTTGACTTCTTA |
| 1495 | AAGAAGTCAAAATATATTA | 5056 | TAATATATTTTGACTTCTT |
| 1496 | AGAAGTCAAAATATATTAT | 5057 | ATAATATATTTTGACTTCT |
| 1497 | GAAGTCAAAATATATTATC | 5058 | GATAATATATTTTGACTTC |
| 1498 | AAGTCAAAATATATTATCA | 5059 | TGATAATATATTTTGACTT |
| 1499 | AGTCAAAATATATTATCAA | 5060 | TTGATAATATATTTTGACT |
| 1500 | GTCAAAATATATTATCAAT | 5061 | ATTGATAATATATTTTGAC |
| 1501 | TCAAAATATATTATCAATG | 5062 | CATTGATAATATATTTTGA |
| 1502 | CAAAATATATTATCAATGG | 5063 | CCATTGATAATATATTTTG |
| 1503 | AAAATATATTATCAATGGG | 5064 | CCCATTGATAATATATTTT |
| 1504 | AAATATATTATCAATGGGA | 5065 | TCCCATTGATAATATATTT |
| 1505 | AATATATTATCAATGGGAT | 5066 | ATCCCATTGATAATATATT |
| 1506 | ATATATTATCAATGGGATA | 5067 | TATCCCATTGATAATATAT |
| 1507 | TATATTATCAATGGGATAT | 5068 | ATATCCCATTGATAATATA |
| 1508 | ATATTATCAATGGGATATA | 5069 | TATATCCCATTGATAATAT |
| 1509 | TATTATCAATGGGATATAC | 5070 | GTATATCCCATTGATAATA |
| 1510 | ATTATCAATGGGATATACA | 5071 | TGTATATCCCATTGATAAT |
| 1511 | TTATCAATGGGATATACAC | 5072 | GTGTATATCCCATTGATAA |
| 1512 | TATCAATGGGATATACACA | 5073 | TGTGTATATCCCATTGATA |
| 1513 | ATCAATGGGATATACACAG | 5074 | CTGTGTATATCCCATTGAT |
| 1514 | TCAATGGGATATACACAGC | 5075 | GCTGTGTATATCCCATTGA |
| 1515 | CAATGGGATATACACAGCA | 5076 | TGCTGTGTATATCCCATTG |
| 1516 | AATGGGATATACACAGCAG | 5077 | CTGCTGTGTATATCCCATT |
| 1517 | ATGGGATATACACAGCAGA | 5078 | TCTGCTGTGTATATCCCAT |
| 1518 | TGGGATATACACAGCAGAG | 5079 | CTCTGCTGTGTATATCCCA |
| 1519 | GGGATATACACAGCAGAGA | 5080 | TCTCTGCTGTGTATATCCC |
| 1520 | GGATATACACAGCAGAGAT | 5081 | ATCTCTGCTGTGTATATCC |
| 1521 | GATATACACAGCAGAGATC | 5082 | GATCTCTGCTGTGTATATC |
| 1522 | ATATACACAGCAGAGATCC | 5083 | GGATCTCTGCTGTGTATAT |
| 1523 | TATACACAGCAGAGATCCT | 5084 | AGGATCTCTGCTGTGTATA |
| 1524 | ATACACAGCAGAGATCCTG | 5085 | CAGGATCTCTGCTGTGTAT |
| 1525 | TACACAGCAGAGATCCTGG | 5086 | CCAGGATCTCTGCTGTGTA |
| 1526 | ACACAGCAGAGATCCTGGC | 5087 | GCCAGGATCTCTGCTGTGT |
| 1527 | CACAGCAGAGATCCTGGCT | 5088 | AGCCAGGATCTCTGCTGTG |
| 1528 | ACAGCAGAGATCCTGGCTA | 5089 | TAGCCAGGATCTCTGCTGT |
| 1529 | CAGCAGAGATCCTGGCTAT | 5090 | ATAGCCAGGATCTCTGCTG |
| 1530 | AGCAGAGATCCTGGCTATA | 5091 | TATAGCCAGGATCTCTGCT |
| 1531 | GCAGAGATCCTGGCTATAG | 5092 | CTATAGCCAGGATCTCTGC |
| 1532 | CAGAGATCCTGGCTATAGA | 5093 | TCTATAGCCAGGATCTCTG |
| 1533 | AGAGATCCTGGCTATAGAT | 5094 | ATCTATAGCCAGGATCTCT |
| 1534 | GAGATCCTGGCTATAGATG | 5095 | CATCTATAGCCAGGATCTC |
| 1535 | AGATCCTGGCTATAGATGA | 5096 | TCATCTATAGCCAGGATCT |
| 1536 | GATCCTGGCTATAGATGAT | 5097 | ATCATCTATAGCCAGGATC |
| 1537 | ATCCTGGCTATAGATGATG | 5098 | CATCATCTATAGCCAGGAT |
| 1538 | TCCTGGCTATAGATGATGG | 5099 | CCATCATCTATAGCCAGGA |
| 1539 | CCTGGCTATAGATGATGGC | 5100 | GCCATCATCTATAGCCAGG |
| 1540 | CTGGCTATAGATGATGGCT | 5101 | AGCCATCATCTATAGCCAG |
| 1541 | TGGCTATAGATGATGGCTC | 5102 | GAGCCATCATCTATAGCCA |
| 1542 | GGCTATAGATGATGGCTCT | 5103 | AGAGCCATCATCTATAGCC |
| 1543 | GCTATAGATGATGGCTCTG | 5104 | CAGAGCCATCATCTATAGC |
| 1544 | CTATAGATGATGGCTCTGG | 5105 | CCAGAGCCATCATCTATAG |
| 1545 | TATAGATGATGGCTCTGGA | 5106 | TCCAGAGCCATCATCTATA |
| 1546 | ATAGATGATGGCTCTGGAA | 5107 | TTCCAGAGCCATCATCTAT |
| 1547 | TAGATGATGGCTCTGGAAA | 5108 | TTTCCAGAGCCATCATCTA |
| 1548 | AGATGATGGCTCTGGAAAA | 5109 | TTTTCCAGAGCCATCATCT |
| 1549 | GATGATGGCTCTGGAAAAA | 5110 | TTTTTCCAGAGCCATCATC |
| 1550 | ATGATGGCTCTGGAAAAAC | 5111 | GTTTTTCCAGAGCCATCAT |
| 1551 | TGATGGCTCTGGAAAAACA | 5112 | TGTTTTTCCAGAGCCATCA |
| 1552 | GATGGCTCTGGAAAAACAG | 5113 | CTGTTTTTCCAGAGCCATC |
| 1553 | ATGGCTCTGGAAAAACAGC | 5114 | GCTGTTTTTCCAGAGCCAT |
| 1554 | TGGCTCTGGAAAAACAGCT | 5115 | AGCTGTTTTTCCAGAGCCA |
| 1555 | GGCTCTGGAAAAACAGCTA | 5116 | TAGCTGTTTTTCCAGAGCC |
| 1556 | GCTCTGGAAAAACAGCTAC | 5117 | GTAGCTGTTTTTCCAGAGC |
| 1557 | CTCTGGAAAAACAGCTACA | 5118 | TGTAGCTGTTTTTCCAGAG |
| 1558 | TCTGGAAAAACAGCTACAG | 5119 | CTGTAGCTGTTTTTCCAGA |
| 1559 | CTGGAAAAACAGCTACAGG | 5120 | CCTGTAGCTGTTTTTCCAG |
| 1560 | TGGAAAAACAGCTACAGGA | 5121 | TCCTGTAGCTGTTTTTCCA |
| 1561 | GGAAAAACAGCTACAGGAA | 5122 | TTCCTGTAGCTGTTTTTCC |
| 1562 | GAAAAACAGCTACAGGAAC | 5123 | GTTCCTGTAGCTGTTTTTC |
| 1563 | AAAAACAGCTACAGGAACC | 5124 | GGTTCCTGTAGCTGTTTTT |
| 1564 | AAAACAGCTACAGGAACCA | 5125 | TGGTTCCTGTAGCTGTTTT |
| 1565 | AAACAGCTACAGGAACCAT | 5126 | ATGGTTCCTGTAGCTGTTT |
| 1566 | AACAGCTACAGGAACCATA | 5127 | TATGGTTCCTGTAGCTGTT |
| 1567 | ACAGCTACAGGAACCATAT | 5128 | ATATGGTTCCTGTAGCTGT |
| 1568 | CAGCTACAGGAACCATATG | 5129 | CATATGGTTCCTGTAGCTG |
| 1569 | AGCTACAGGAACCATATGT | 5130 | ACATATGGTTCCTGTAGCT |
| 1570 | GCTACAGGAACCATATGTA | 5131 | TACATATGGTTCCTGTAGC |
| 1571 | CTACAGGAACCATATGTAT | 5132 | ATACATATGGTTCCTGTAG |
| 1572 | TACAGGAACCATATGTATT | 5133 | AATACATATGGTTCCTGTA |
| 1573 | ACAGGAACCATATGTATTG | 5134 | CAATACATATGGTTCCTGT |
| 1574 | CAGGAACCATATGTATTGA | 5135 | TCAATACATATGGTTCCTG |
| 1575 | AGGAACCATATGTATTGAG | 5136 | CTCAATACATATGGTTCCT |
| 1576 | GGAACCATATGTATTGAGG | 5137 | CCTCAATACATATGGTTCC |
| 1577 | GAACCATATGTATTGAGGT | 5138 | ACCTCAATACATATGGTTC |
| 1578 | AACCATATGTATTGAGGTT | 5139 | AACCTCAATACATATGGTT |
| 1579 | ACCATATGTATTGAGGTTC | 5140 | GAACCTCAATACATATGGT |
| 1580 | CCATATGTATTGAGGTTCC | 5141 | GGAACCTCAATACATATGG |
| 1581 | CATATGTATTGAGGTTCCT | 5142 | AGGAACCTCAATACATATG |
| 1582 | ATATGTATTGAGGTTCCTG | 5143 | CAGGAACCTCAATACATAT |
| 1583 | TATGTATTGAGGTTCCTGA | 5144 | TCAGGAACCTCAATACATA |
| 1584 | ATGTATTGAGGTTCCTGAT | 5145 | ATCAGGAACCTCAATACAT |
| 1585 | TGTATTGAGGTTCCTGATA | 5146 | TATCAGGAACCTCAATACA |
| 1586 | GTATTGAGGTTCCTGATAT | 5147 | ATATCAGGAACCTCAATAC |
| 1587 | TATTGAGGTTCCTGATATC | 5148 | GATATCAGGAACCTCAATA |
| 1588 | ATTGAGGTTCCTGATATCA | 5149 | TGATATCAGGAACCTCAAT |
| 1589 | TTGAGGTTCCTGATATCAA | 5150 | TTGATATCAGGAACCTCAA |
| 1590 | TGAGGTTCCTGATATCAAT | 5151 | ATTGATATCAGGAACCTCA |
| 1591 | GAGGTTCCTGATATCAATG | 5152 | CATTGATATCAGGAACCTC |
| 1592 | AGGTTCCTGATATCAATGA | 5153 | TCATTGATATCAGGAACCT |
| 1593 | GGTTCCTGATATCAATGAT | 5154 | ATCATTGATATCAGGAACC |
| 1594 | GTTCCTGATATCAATGATT | 5155 | AATCATTGATATCAGGAAC |
| 1595 | TTCCTGATATCAATGATTA | 5156 | TAATCATTGATATCAGGAA |
| 1596 | TCCTGATATCAATGATTAT | 5157 | ATAATCATTGATATCAGGA |
| 1597 | CCTGATATCAATGATTATT | 5158 | AATAATCATTGATATCAGG |
| 1598 | CTGATATCAATGATTATTG | 5159 | CAATAATCATTGATATCAG |
| 1599 | TGATATCAATGATTATTGT | 5160 | ACAATAATCATTGATATCA |
| 1600 | GATATCAATGATTATTGTC | 5161 | GACAATAATCATTGATATC |
| 1601 | ATATCAATGATTATTGTCC | 5162 | GGACAATAATCATTGATAT |
| 1602 | TATCAATGATTATTGTCCA | 5163 | TGGACAATAATCATTGATA |
| 1603 | ATCAATGATTATTGTCCAA | 5164 | TTGGACAATAATCATTGAT |
| 1604 | TCAATGATTATTGTCCAAA | 5165 | TTTGGACAATAATCATTGA |
| 1605 | CAATGATTATTGTCCAAAC | 5166 | GTTTGGACAATAATCATTG |
| 1606 | AATGATTATTGTCCAAACA | 5167 | TGTTTGGACAATAATCATT |
| 1607 | ATGATTATTGTCCAAACAT | 5168 | ATGTTTGGACAATAATCAT |
| 1608 | TGATTATTGTCCAAACATT | 5169 | AATGTTTGGACAATAATCA |
| 1609 | GATTATTGTCCAAACATTT | 5170 | AAATGTTTGGACAATAATC |
| 1610 | ATTATTGTCCAAACATTTT | 5171 | AAAATGTTTGGACAATAAT |
| 1611 | TTATTGTCCAAACATTTTT | 5172 | AAAAATGTTTGGACAATAA |
| 1612 | TATTGTCCAAACATTTTTC | 5173 | GAAAAATGTTTGGACAATA |
| 1613 | ATTGTCCAAACATTTTTCC | 5174 | GGAAAAATGTTTGGACAAT |
| 1614 | TTGTCCAAACATTTTTCCT | 5175 | AGGAAAAATGTTTGGACAA |
| 1615 | TGTCCAAACATTTTTCCTG | 5176 | CAGGAAAAATGTTTGGACA |
| 1616 | GTCCAAACATTTTTCCTGA | 5177 | TCAGGAAAAATGTTTGGAC |
| 1617 | TCCAAACATTTTTCCTGAA | 5178 | TTCAGGAAAAATGTTTGGA |
| 1618 | CCAAACATTTTTCCTGAAA | 5179 | TTTCAGGAAAAATGTTTGG |
| 1619 | CAAACATTTTTCCTGAAAG | 5180 | CTTTCAGGAAAAATGTTTG |
| 1620 | AAACATTTTTCCTGAAAGA | 5181 | TCTTTCAGGAAAAATGTTT |
| 1621 | AACATTTTTCCTGAAAGAA | 5182 | TTCTTTCAGGAAAAATGTT |
| 1622 | ACATTTTTCCTGAAAGAAG | 5183 | CTTCTTTCAGGAAAAATGT |
| 1623 | CATTTTTCCTGAAAGAAGA | 5184 | TCTTCTTTCAGGAAAAATG |
| 1624 | ATTTTTCCTGAAAGAAGAA | 5185 | TTCTTCTTTCAGGAAAAAT |
| 1625 | TTTTTCCTGAAAGAAGAAC | 5186 | GTTCTTCTTTCAGGAAAAA |
| 1626 | TTTTCCTGAAAGAAGAACC | 5187 | GGTTCTTCTTTCAGGAAAA |
| 1627 | TTTCCTGAAAGAAGAACCA | 5188 | TGGTTCTTCTTTCAGGAAA |
| 1628 | TTCCTGAAAGAAGAACCAT | 5189 | ATGGTTCTTCTTTCAGGAA |
| 1629 | TCCTGAAAGAAGAACCATC | 5190 | GATGGTTCTTCTTTCAGGA |
| 1630 | CCTGAAAGAAGAACCATCT | 5191 | AGATGGTTCTTCTTTCAGG |
| 1631 | CTGAAAGAAGAACCATCTG | 5192 | CAGATGGTTCTTCTTTCAG |
| 1632 | TGAAAGAAGAACCATCTGC | 5193 | GCAGATGGTTCTTCTTTCA |
| 1633 | GAAAGAAGAACCATCTGCA | 5194 | TGCAGATGGTTCTTCTTTC |
| 1634 | AAAGAAGAACCATCTGCAT | 5195 | ATGCAGATGGTTCTTCTTT |
| 1635 | AAGAAGAACCATCTGCATT | 5196 | AATGCAGATGGTTCTTCTT |
| 1636 | AGAAGAACCATCTGCATTG | 5197 | CAATGCAGATGGTTCTTCT |
| 1637 | GAAGAACCATCTGCATTGA | 5198 | TCAATGCAGATGGTTCTTC |
| 1638 | AAGAACCATCTGCATTGAC | 5199 | GTCAATGCAGATGGTTCTT |
| 1639 | AGAACCATCTGCATTGACT | 5200 | AGTCAATGCAGATGGTTCT |
| 1640 | GAACCATCTGCATTGACTC | 5201 | GAGTCAATGCAGATGGTTC |
| 1641 | AACCATCTGCATTGACTCT | 5202 | AGAGTCAATGCAGATGGTT |
| 1642 | ACCATCTGCATTGACTCTC | 5203 | GAGAGTCAATGCAGATGGT |
| 1643 | CCATCTGCATTGACTCTCC | 5204 | GGAGAGTCAATGCAGATGG |
| 1644 | CATCTGCATTGACTCTCCA | 5205 | TGGAGAGTCAATGCAGATG |
| 1645 | ATCTGCATTGACTCTCCAT | 5206 | ATGGAGAGTCAATGCAGAT |
| 1646 | TCTGCATTGACTCTCCATC | 5207 | GATGGAGAGTCAATGCAGA |
| 1647 | CTGCATTGACTCTCCATCA | 5208 | TGATGGAGAGTCAATGCAG |
| 1648 | TGCATTGACTCTCCATCAG | 5209 | CTGATGGAGAGTCAATGCA |
| 1649 | GCATTGACTCTCCATCAGT | 5210 | ACTGATGGAGAGTCAATGC |
| 1650 | CATTGACTCTCCATCAGTC | 5211 | GACTGATGGAGAGTCAATG |
| 1651 | ATTGACTCTCCATCAGTCC | 5212 | GGACTGATGGAGAGTCAAT |
| 1652 | TTGACTCTCCATCAGTCCT | 5213 | AGGACTGATGGAGAGTCAA |
| 1653 | TGACTCTCCATCAGTCCTT | 5214 | AAGGACTGATGGAGAGTCA |
| 1654 | GACTCTCCATCAGTCCTTA | 5215 | TAAGGACTGATGGAGAGTC |
| 1655 | ACTCTCCATCAGTCCTTAT | 5216 | ATAAGGACTGATGGAGAGT |
| 1656 | CTCTCCATCAGTCCTTATC | 5217 | GATAAGGACTGATGGAGAG |
| 1657 | TCTCCATCAGTCCTTATCT | 5218 | AGATAAGGACTGATGGAGA |
| 1658 | CTCCATCAGTCCTTATCTC | 5219 | GAGATAAGGACTGATGGAG |
| 1659 | TCCATCAGTCCTTATCTCT | 5220 | AGAGATAAGGACTGATGGA |
| 1660 | CCATCAGTCCTTATCTCTG | 5221 | CAGAGATAAGGACTGATGG |
| 1661 | CATCAGTCCTTATCTCTGT | 5222 | ACAGAGATAAGGACTGATG |
| 1662 | ATCAGTCCTTATCTCTGTT | 5223 | AACAGAGATAAGGACTGAT |
| 1663 | TCAGTCCTTATCTCTGTTA | 5224 | TAACAGAGATAAGGACTGA |
| 1664 | CAGTCCTTATCTCTGTTAA | 5225 | TTAACAGAGATAAGGACTG |
| 1665 | AGTCCTTATCTCTGTTAAT | 5226 | ATTAACAGAGATAAGGACT |
| 1666 | GTCCTTATCTCTGTTAATG | 5227 | CATTAACAGAGATAAGGAC |
| 1667 | TCCTTATCTCTGTTAATGA | 5228 | TCATTAACAGAGATAAGGA |
| 1668 | CCTTATCTCTGTTAATGAA | 5229 | TTCATTAACAGAGATAAGG |
| 1669 | CTTATCTCTGTTAATGAAC | 5230 | GTTCATTAACAGAGATAAG |
| 1670 | TTATCTCTGTTAATGAACA | 5231 | TGTTCATTAACAGAGATAA |
| 1671 | TATCTCTGTTAATGAACAT | 5232 | ATGTTCATTAACAGAGATA |
| 1672 | ATCTCTGTTAATGAACATT | 5233 | AATGTTCATTAACAGAGAT |
| 1673 | TCTCTGTTAATGAACATTC | 5234 | GAATGTTCATTAACAGAGA |
| 1674 | CTCTGTTAATGAACATTCT | 5235 | AGAATGTTCATTAACAGAG |
| 1675 | TCTGTTAATGAACATTCTT | 5236 | AAGAATGTTCATTAACAGA |
| 1676 | CTGTTAATGAACATTCTTA | 5237 | TAAGAATGTTCATTAACAG |
| 1677 | TGTTAATGAACATTCTTAT | 5238 | ATAAGAATGTTCATTAACA |
| 1678 | GTTAATGAACATTCTTATG | 5239 | CATAAGAATGTTCATTAAC |
| 1679 | TTAATGAACATTCTTATGG | 5240 | CCATAAGAATGTTCATTAA |
| 1680 | TAATGAACATTCTTATGGG | 5241 | CCCATAAGAATGTTCATTA |
| 1681 | AATGAACATTCTTATGGGT | 5242 | ACCCATAAGAATGTTCATT |
| 1682 | ATGAACATTCTTATGGGTC | 5243 | GACCCATAAGAATGTTCAT |
| 1683 | TGAACATTCTTATGGGTCT | 5244 | AGACCCATAAGAATGTTCA |
| 1684 | GAACATTCTTATGGGTCTC | 5245 | GAGACCCATAAGAATGTTC |
| 1685 | AACATTCTTATGGGTCTCC | 5246 | GGAGACCCATAAGAATGTT |
| 1686 | ACATTCTTATGGGTCTCCG | 5247 | CGGAGACCCATAAGAATGT |
| 1687 | CATTCTTATGGGTCTCCGT | 5248 | ACGGAGACCCATAAGAATG |
| 1688 | ATTCTTATGGGTCTCCGTT | 5249 | AACGGAGACCCATAAGAAT |
| 1689 | TTCTTATGGGTCTCCGTTT | 5250 | AAACGGAGACCCATAAGAA |
| 1690 | TCTTATGGGTCTCCGTTTA | 5251 | TAAACGGAGACCCATAAGA |
| 1691 | CTTATGGGTCTCCGTTTAC | 5252 | GTAAACGGAGACCCATAAG |
| 1692 | TTATGGGTCTCCGTTTACT | 5253 | AGTAAACGGAGACCCATAA |
| 1693 | TATGGGTCTCCGTTTACTT | 5254 | AAGTAAACGGAGACCCATA |
| 1694 | ATGGGTCTCCGTTTACTTT | 5255 | AAAGTAAACGGAGACCCAT |
| 1695 | TGGGTCTCCGTTTACTTTC | 5256 | GAAAGTAAACGGAGACCCA |
| 1696 | GGGTCTCCGTTTACTTTCT | 5257 | AGAAAGTAAACGGAGACCC |
| 1697 | GGTCTCCGTTTACTTTCTG | 5258 | CAGAAAGTAAACGGAGACC |
| 1698 | GTCTCCGTTTACTTTCTGT | 5259 | ACAGAAAGTAAACGGAGAC |
| 1699 | TCTCCGTTTACTTTCTGTG | 5260 | CACAGAAAGTAAACGGAGA |
| 1700 | CTCCGTTTACTTTCTGTGT | 5261 | ACACAGAAAGTAAACGGAG |
| 1701 | TCCGTTTACTTTCTGTGTT | 5262 | AACACAGAAAGTAAACGGA |
| 1702 | CCGTTTACTTTCTGTGTTG | 5263 | CAACACAGAAAGTAAACGG |
| 1703 | CGTTTACTTTCTGTGTTGT | 5264 | ACAACACAGAAAGTAAACG |
| 1704 | GTTTACTTTCTGTGTTGTT | 5265 | AACAACACAGAAAGTAAAC |
| 1705 | TTTACTTTCTGTGTTGTTG | 5266 | CAACAACACAGAAAGTAAA |
| 1706 | TTACTTTCTGTGTTGTTGA | 5267 | TCAACAACACAGAAAGTAA |
| 1707 | TACTTTCTGTGTTGTTGAT | 5268 | ATCAACAACACAGAAAGTA |
| 1708 | ACTTTCTGTGTTGTTGATG | 5269 | CATCAACAACACAGAAAGT |
| 1709 | CTTTCTGTGTTGTTGATGA | 5270 | TCATCAACAACACAGAAAG |
| 1710 | TTTCTGTGTTGTTGATGAG | 5271 | CTCATCAACAACACAGAAA |
| 1711 | TTCTGTGTTGTTGATGAGC | 5272 | GCTCATCAACAACACAGAA |
| 1712 | TCTGTGTTGTTGATGAGCC | 5273 | GGCTCATCAACAACACAGA |
| 1713 | CTGTGTTGTTGATGAGCCA | 5274 | TGGCTCATCAACAACACAG |
| 1714 | TGTGTTGTTGATGAGCCAC | 5275 | GTGGCTCATCAACAACACA |
| 1715 | GTGTTGTTGATGAGCCACC | 5276 | GGTGGCTCATCAACAACAC |
| 1716 | TGTTGTTGATGAGCCACCA | 5277 | TGGTGGCTCATCAACAACA |
| 1717 | GTTGTTGATGAGCCACCAG | 5278 | CTGGTGGCTCATCAACAAC |
| 1718 | TTGTTGATGAGCCACCAGG | 5279 | CCTGGTGGCTCATCAACAA |
| 1719 | TGTTGATGAGCCACCAGGA | 5280 | TCCTGGTGGCTCATCAACA |
| 1720 | GTTGATGAGCCACCAGGAA | 5281 | TTCCTGGTGGCTCATCAAC |
| 1721 | TTGATGAGCCACCAGGAAT | 5282 | ATTCCTGGTGGCTCATCAA |
| 1722 | TGATGAGCCACCAGGAATA | 5283 | TATTCCTGGTGGCTCATCA |
| 1723 | GATGAGCCACCAGGAATAG | 5284 | CTATTCCTGGTGGCTCATC |
| 1724 | ATGAGCCACCAGGAATAGC | 5285 | GCTATTCCTGGTGGCTCAT |
| 1725 | TGAGCCACCAGGAATAGCT | 5286 | AGCTATTCCTGGTGGCTCA |
| 1726 | GAGCCACCAGGAATAGCTG | 5287 | CAGCTATTCCTGGTGGCTC |
| 1727 | AGCCACCAGGAATAGCTGA | 5288 | TCAGCTATTCCTGGTGGCT |
| 1728 | GCCACCAGGAATAGCTGAC | 5289 | GTCAGCTATTCCTGGTGGC |
| 1729 | CCACCAGGAATAGCTGACA | 5290 | TGTCAGCTATTCCTGGTGG |
| 1730 | CACCAGGAATAGCTGACAT | 5291 | ATGTCAGCTATTCCTGGTG |
| 1731 | ACCAGGAATAGCTGACATG | 5292 | CATGTCAGCTATTCCTGGT |
| 1732 | CCAGGAATAGCTGACATGT | 5293 | ACATGTCAGCTATTCCTGG |
| 1733 | CAGGAATAGCTGACATGTG | 5294 | CACATGTCAGCTATTCCTG |
| 1734 | AGGAATAGCTGACATGTGG | 5295 | CCACATGTCAGCTATTCCT |
| 1735 | GGAATAGCTGACATGTGGG | 5296 | CCCACATGTCAGCTATTCC |
| 1736 | GAATAGCTGACATGTGGGA | 5297 | TCCCACATGTCAGCTATTC |
| 1737 | AATAGCTGACATGTGGGAT | 5298 | ATCCCACATGTCAGCTATT |
| 1738 | ATAGCTGACATGTGGGATG | 5299 | CATCCCACATGTCAGCTAT |
| 1739 | TAGCTGACATGTGGGATGT | 5300 | ACATCCCACATGTCAGCTA |
| 1740 | AGCTGACATGTGGGATGTC | 5301 | GACATCCCACATGTCAGCT |
| 1741 | GCTGACATGTGGGATGTCA | 5302 | TGACATCCCACATGTCAGC |
| 1742 | CTGACATGTGGGATGTCAG | 5303 | CTGACATCCCACATGTCAG |
| 1743 | TGACATGTGGGATGTCAGA | 5304 | TCTGACATCCCACATGTCA |
| 1744 | GACATGTGGGATGTCAGAT | 5305 | ATCTGACATCCCACATGTC |
| 1745 | ACATGTGGGATGTCAGATC | 5306 | GATCTGACATCCCACATGT |
| 1746 | CATGTGGGATGTCAGATCA | 5307 | TGATCTGACATCCCACATG |
| 1747 | ATGTGGGATGTCAGATCAA | 5308 | TTGATCTGACATCCCACAT |
| 1748 | TGTGGGATGTCAGATCAAC | 5309 | GTTGATCTGACATCCCACA |
| 1749 | GTGGGATGTCAGATCAACA | 5310 | TGTTGATCTGACATCCCAC |
| 1750 | TGGGATGTCAGATCAACAA | 5311 | TTGTTGATCTGACATCCCA |
| 1751 | GGGATGTCAGATCAACAAA | 5312 | TTTGTTGATCTGACATCCC |
| 1752 | GGATGTCAGATCAACAAAT | 5313 | ATTTGTTGATCTGACATCC |
| 1753 | GATGTCAGATCAACAAATG | 5314 | CATTTGTTGATCTGACATC |
| 1754 | ATGTCAGATCAACAAATGC | 5315 | GCATTTGTTGATCTGACAT |
| 1755 | TGTCAGATCAACAAATGCT | 5316 | AGCATTTGTTGATCTGACA |
| 1756 | GTCAGATCAACAAATGCTA | 5317 | TAGCATTTGTTGATCTGAC |
| 1757 | TCAGATCAACAAATGCTAC | 5318 | GTAGCATTTGTTGATCTGA |
| 1758 | CAGATCAACAAATGCTACC | 5319 | GGTAGCATTTGTTGATCTG |
| 1759 | AGATCAACAAATGCTACCT | 5320 | AGGTAGCATTTGTTGATCT |
| 1760 | GATCAACAAATGCTACCTC | 5321 | GAGGTAGCATTTGTTGATC |
| 1761 | ATCAACAAATGCTACCTCG | 5322 | CGAGGTAGCATTTGTTGAT |
| 1762 | TCAACAAATGCTACCTCGG | 5323 | CCGAGGTAGCATTTGTTGA |
| 1763 | CAACAAATGCTACCTCGGC | 5324 | GCCGAGGTAGCATTTGTTG |
| 1764 | AACAAATGCTACCTCGGCA | 5325 | TGCCGAGGTAGCATTTGTT |
| 1765 | ACAAATGCTACCTCGGCAA | 5326 | TTGCCGAGGTAGCATTTGT |
| 1766 | CAAATGCTACCTCGGCAAT | 5327 | ATTGCCGAGGTAGCATTTG |
| 1767 | AAATGCTACCTCGGCAATC | 5328 | GATTGCCGAGGTAGCATTT |
| 1768 | AATGCTACCTCGGCAATCC | 5329 | GGATTGCCGAGGTAGCATT |
| 1769 | ATGCTACCTCGGCAATCCT | 5330 | AGGATTGCCGAGGTAGCAT |
| 1770 | TGCTACCTCGGCAATCCTT | 5331 | AAGGATTGCCGAGGTAGCA |
| 1771 | GCTACCTCGGCAATCCTTA | 5332 | TAAGGATTGCCGAGGTAGC |
| 1772 | CTACCTCGGCAATCCTTAC | 5333 | GTAAGGATTGCCGAGGTAG |
| 1773 | TACCTCGGCAATCCTTACG | 5334 | CGTAAGGATTGCCGAGGTA |
| 1774 | ACCTCGGCAATCCTTACGG | 5335 | CCGTAAGGATTGCCGAGGT |
| 1775 | CCTCGGCAATCCTTACGGC | 5336 | GCCGTAAGGATTGCCGAGG |
| 1776 | CTCGGCAATCCTTACGGCT | 5337 | AGCCGTAAGGATTGCCGAG |
| 1777 | TCGGCAATCCTTACGGCTA | 5338 | TAGCCGTAAGGATTGCCGA |
| 1778 | CGGCAATCCTTACGGCTAA | 5339 | TTAGCCGTAAGGATTGCCG |
| 1779 | GGCAATCCTTACGGCTAAG | 5340 | CTTAGCCGTAAGGATTGCC |
| 1780 | GCAATCCTTACGGCTAAGC | 5341 | GCTTAGCCGTAAGGATTGC |
| 1781 | CAATCCTTACGGCTAAGCA | 5342 | TGCTTAGCCGTAAGGATTG |
| 1782 | AATCCTTACGGCTAAGCAG | 5343 | CTGCTTAGCCGTAAGGATT |
| 1783 | ATCCTTACGGCTAAGCAGG | 5344 | CCTGCTTAGCCGTAAGGAT |
| 1784 | TCCTTACGGCTAAGCAGGT | 5345 | ACCTGCTTAGCCGTAAGGA |
| 1785 | CCTTACGGCTAAGCAGGTT | 5346 | AACCTGCTTAGCCGTAAGG |
| 1786 | CTTACGGCTAAGCAGGTTT | 5347 | AAACCTGCTTAGCCGTAAG |
| 1787 | TTACGGCTAAGCAGGTTTT | 5348 | AAAACCTGCTTAGCCGTAA |
| 1788 | TACGGCTAAGCAGGTTTTA | 5349 | TAAAACCTGCTTAGCCGTA |
| 1789 | ACGGCTAAGCAGGTTTTAT | 5350 | ATAAAACCTGCTTAGCCGT |
| 1790 | CGGCTAAGCAGGTTTTATC | 5351 | GATAAAACCTGCTTAGCCG |
| 1791 | GGCTAAGCAGGTTTTATCT | 5352 | AGATAAAACCTGCTTAGCC |
| 1792 | GCTAAGCAGGTTTTATCTC | 5353 | GAGATAAAACCTGCTTAGC |
| 1793 | CTAAGCAGGTTTTATCTCC | 5354 | GGAGATAAAACCTGCTTAG |
| 1794 | TAAGCAGGTTTTATCTCCA | 5355 | TGGAGATAAAACCTGCTTA |
| 1795 | AAGCAGGTTTTATCTCCAG | 5356 | CTGGAGATAAAACCTGCTT |
| 1796 | AGCAGGTTTTATCTCCAGG | 5357 | CCTGGAGATAAAACCTGCT |
| 1797 | GCAGGTTTTATCTCCAGGA | 5358 | TCCTGGAGATAAAACCTGC |
| 1798 | CAGGTTTTATCTCCAGGAT | 5359 | ATCCTGGAGATAAAACCTG |
| 1799 | AGGTTTTATCTCCAGGATT | 5360 | AATCCTGGAGATAAAACCT |
| 1800 | GGTTTTATCTCCAGGATTT | 5361 | AAATCCTGGAGATAAAACC |
| 1801 | GTTTTATCTCCAGGATTTT | 5362 | AAAATCCTGGAGATAAAAC |
| 1802 | TTTTATCTCCAGGATTTTA | 5363 | TAAAATCCTGGAGATAAAA |
| 1803 | TTTATCTCCAGGATTTTAT | 5364 | ATAAAATCCTGGAGATAAA |
| 1804 | TTATCTCCAGGATTTTATG | 5365 | CATAAAATCCTGGAGATAA |
| 1805 | TATCTCCAGGATTTTATGA | 5366 | TCATAAAATCCTGGAGATA |
| 1806 | ATCTCCAGGATTTTATGAA | 5367 | TTCATAAAATCCTGGAGAT |
| 1807 | TCTCCAGGATTTTATGAAA | 5368 | TTTCATAAAATCCTGGAGA |
| 1808 | CTCCAGGATTTTATGAAAT | 5369 | ATTTCATAAAATCCTGGAG |
| 1809 | TCCAGGATTTTATGAAATC | 5370 | GATTTCATAAAATCCTGGA |
| 1810 | CCAGGATTTTATGAAATCC | 5371 | GGATTTCATAAAATCCTGG |
| 1811 | CAGGATTTTATGAAATCCC | 5372 | GGGATTTCATAAAATCCTG |
| 1812 | AGGATTTTATGAAATCCCA | 5373 | TGGGATTTCATAAAATCCT |
| 1813 | GGATTTTATGAAATCCCAA | 5374 | TTGGGATTTCATAAAATCC |
| 1814 | GATTTTATGAAATCCCAAT | 5375 | ATTGGGATTTCATAAAATC |
| 1815 | ATTTTATGAAATCCCAATC | 5376 | GATTGGGATTTCATAAAAT |
| 1816 | TTTTATGAAATCCCAATCC | 5377 | GGATTGGGATTTCATAAAA |
| 1817 | TTTATGAAATCCCAATCCT | 5378 | AGGATTGGGATTTCATAAA |
| 1818 | TTATGAAATCCCAATCCTG | 5379 | CAGGATTGGGATTTCATAA |
| 1819 | TATGAAATCCCAATCCTGG | 5380 | CCAGGATTGGGATTTCATA |
| 1820 | ATGAAATCCCAATCCTGGT | 5381 | ACCAGGATTGGGATTTCAT |
| 1821 | TGAAATCCCAATCCTGGTG | 5382 | CACCAGGATTGGGATTTCA |
| 1822 | GAAATCCCAATCCTGGTGA | 5383 | TCACCAGGATTGGGATTTC |
| 1823 | AAATCCCAATCCTGGTGAA | 5384 | TTCACCAGGATTGGGATTT |
| 1824 | AATCCCAATCCTGGTGAAG | 5385 | CTTCACCAGGATTGGGATT |
| 1825 | ATCCCAATCCTGGTGAAGG | 5386 | CCTTCACCAGGATTGGGAT |
| 1826 | TCCCAATCCTGGTGAAGGA | 5387 | TCCTTCACCAGGATTGGGA |
| 1827 | CCCAATCCTGGTGAAGGAC | 5388 | GTCCTTCACCAGGATTGGG |
| 1828 | CCAATCCTGGTGAAGGACA | 5389 | TGTCCTTCACCAGGATTGG |
| 1829 | CAATCCTGGTGAAGGACAG | 5390 | CTGTCCTTCACCAGGATTG |
| 1830 | AATCCTGGTGAAGGACAGC | 5391 | GCTGTCCTTCACCAGGATT |
| 1831 | ATCCTGGTGAAGGACAGCT | 5392 | AGCTGTCCTTCACCAGGAT |
| 1832 | TCCTGGTGAAGGACAGCTA | 5393 | TAGCTGTCCTTCACCAGGA |
| 1833 | CCTGGTGAAGGACAGCTAT | 5394 | ATAGCTGTCCTTCACCAGG |
| 1834 | CTGGTGAAGGACAGCTATA | 5395 | TATAGCTGTCCTTCACCAG |
| 1835 | TGGTGAAGGACAGCTATAA | 5396 | TTATAGCTGTCCTTCACCA |
| 1836 | GGTGAAGGACAGCTATAAC | 5397 | GTTATAGCTGTCCTTCACC |
| 1837 | GTGAAGGACAGCTATAACA | 5398 | TGTTATAGCTGTCCTTCAC |
| 1838 | TGAAGGACAGCTATAACAG | 5399 | CTGTTATAGCTGTCCTTCA |
| 1839 | GAAGGACAGCTATAACAGA | 5400 | TCTGTTATAGCTGTCCTTC |
| 1840 | AAGGACAGCTATAACAGAG | 5401 | CTCTGTTATAGCTGTCCTT |
| 1841 | AGGACAGCTATAACAGAGC | 5402 | GCTCTGTTATAGCTGTCCT |
| 1842 | GGACAGCTATAACAGAGCA | 5403 | TGCTCTGTTATAGCTGTCC |
| 1843 | GACAGCTATAACAGAGCAT | 5404 | ATGCTCTGTTATAGCTGTC |
| 1844 | ACAGCTATAACAGAGCATG | 5405 | CATGCTCTGTTATAGCTGT |
| 1845 | CAGCTATAACAGAGCATGT | 5406 | ACATGCTCTGTTATAGCTG |
| 1846 | AGCTATAACAGAGCATGTG | 5407 | CACATGCTCTGTTATAGCT |
| 1847 | GCTATAACAGAGCATGTGA | 5408 | TCACATGCTCTGTTATAGC |
| 1848 | CTATAACAGAGCATGTGAA | 5409 | TTCACATGCTCTGTTATAG |
| 1849 | TATAACAGAGCATGTGAAT | 5410 | ATTCACATGCTCTGTTATA |
| 1850 | ATAACAGAGCATGTGAATT | 5411 | AATTCACATGCTCTGTTAT |
| 1851 | TAACAGAGCATGTGAATTG | 5412 | CAATTCACATGCTCTGTTA |
| 1852 | AACAGAGCATGTGAATTGG | 5413 | CCAATTCACATGCTCTGTT |
| 1853 | ACAGAGCATGTGAATTGGC | 5414 | GCCAATTCACATGCTCTGT |
| 1854 | CAGAGCATGTGAATTGGCA | 5415 | TGCCAATTCACATGCTGTG |
| 1855 | AGAGCATGTGAATTGGCAC | 5416 | GTGCCAATTCACATGCTCT |
| 1856 | GAGCATGTGAATTGGCACA | 5417 | TGTGCCAATTCACATGCTC |
| 1857 | AGCATGTGAATTGGCACAA | 5418 | TTGTGCCAATTCACATGCT |
| 1858 | GCATGTGAATTGGCACAAA | 5419 | TTTGTGCCAATTCACATGC |
| 1859 | CATGTGAATTGGCACAAAT | 5420 | ATTTGTGCCAATTCACATG |
| 1860 | ATGTGAATTGGCACAAATG | 5421 | CATTTGTGCCAATTCACAT |
| 1861 | TGTGAATTGGCACAAATGG | 5422 | CCATTTGTGCCAATTCACA |
| 1862 | GTGAATTGGCACAAATGGT | 5423 | ACCATTTGTGCCAATTCAC |
| 1863 | TGAATTGGCACAAATGGTG | 5424 | CACCATTTGTGCCAATTCA |
| 1864 | GAATTGGCACAAATGGTGC | 5425 | GCACCATTTGTGCCAATTC |
| 1865 | AATTGGCACAAATGGTGCA | 5426 | TGCACCATTTGTGCCAATT |
| 1866 | ATTGGCACAAATGGTGCAG | 5427 | CTGCACCATTTGTGCCAAT |
| 1867 | TTGGCACAAATGGTGCAGT | 5428 | ACTGCACCATTTGTGCCAA |
| 1868 | TGGCACAAATGGTGCAGTT | 5429 | AACTGCACCATTTGTGCCA |
| 1869 | GGCACAAATGGTGCAGTTA | 5430 | TAACTGCACCATTTGTGCC |
| 1870 | GCACAAATGGTGCAGTTAT | 5431 | ATAACTGCACCATTTGTGC |
| 1871 | CACAAATGGTGCAGTTATA | 5432 | TATAACTGCACCATTTGTG |
| 1872 | ACAAATGGTGCAGTTATAT | 5433 | ATATAACTGCACCATTTGT |
| 1873 | CAAATGGTGCAGTTATATG | 5434 | CATATAACTGCACCATTTG |
| 1874 | AAATGGTGCAGTTATATGC | 5435 | GCATATAACTGCACCATTT |
| 1875 | AATGGTGCAGTTATATGCC | 5436 | GGCATATAACTGCACCATT |
| 1876 | ATGGTGCAGTTATATGCCT | 5437 | AGGCATATAACTGCACCAT |
| 1877 | TGGTGCAGTTATATGCCTG | 5438 | CAGGCATATAACTGCACCA |
| 1878 | GGTGCAGTTATATGCCTGT | 5439 | ACAGGCATATAACTGCACC |
| 1879 | GTGCAGTTATATGCCTGTG | 5440 | CACAGGCATATAACTGCAC |
| 1880 | TGCAGTTATATGCCTGTGA | 5441 | TCACAGGCATATAACTGCA |
| 1881 | GCAGTTATATGCCTGTGAT | 5442 | ATCACAGGCATATAACTGC |
| 1882 | CAGTTATATGCCTGTGATT | 5443 | AATCACAGGCATATAACTG |
| 1883 | AGTTATATGCCTGTGATTG | 5444 | CAATCACAGGCATATAACT |
| 1884 | GTTATATGCCTGTGATTGC | 5445 | GCAATCACAGGCATATAAC |
| 1885 | TTATATGCCTGTGATTGCG | 5446 | CGCAATCACAGGCATATAA |
| 1886 | TATATGCCTGTGATTGCGA | 5447 | TCGCAATCACAGGCATATA |
| 1887 | ATATGCCTGTGATTGCGAT | 5448 | ATCGCAATCACAGGCATAT |
| 1888 | TATGCCTGTGATTGCGATG | 5449 | CATCGCAATCACAGGCATA |
| 1889 | ATGCCTGTGATTGCGATGA | 5450 | TCATCGCAATCACAGGCAT |
| 1890 | TGCCTGTGATTGCGATGAC | 5451 | GTCATCGCAATCACAGGCA |
| 1891 | GCCTGTGATTGCGATGACA | 5452 | TGTCATCGCAATCACAGGC |
| 1892 | CCTGTGATTGCGATGACAA | 5453 | TTGTCATCGCAATCACAGG |
| 1893 | CTGTGATTGCGATGACAAC | 5454 | GTTGTCATCGCAATCACAG |
| 1894 | TGTGATTGCGATGACAACC | 5455 | GGTTGTCATCGCAATCACA |
| 1895 | GTGATTGCGATGACAACCA | 5456 | TGGTTGTCATCGCAATCAC |
| 1896 | TGATTGCGATGACAACCAC | 5457 | GTGGTTGTCATCGCAATCA |
| 1897 | GATTGCGATGACAACCACA | 5458 | TGTGGTTGTCATCGCAATC |
| 1898 | ATTGCGATGACAACCACAT | 5459 | ATGTGGTTGTCATCGCAAT |
| 1899 | TTGCGATGACAACCACATG | 5460 | CATGTGGTTGTCATCGCAA |
| 1900 | TGCGATGACAACCACATGT | 5461 | ACATGTGGTTGTCATCGCA |
| 1901 | GCGATGACAACCACATGTG | 5462 | CACATGTGGTTGTCATCGC |
| 1902 | CGATGACAACCACATGTGC | 5463 | GCACATGTGGTTGTCATCG |
| 1903 | GATGACAACCACATGTGCC | 5464 | GGCACATGTGGTTGTCATC |
| 1904 | ATGACAACCACATGTGCCT | 5465 | AGGCACATGTGGTTGTCAT |
| 1905 | TGACAACCACATGTGCCTG | 5466 | CAGGCACATGTGGTTGTCA |
| 1906 | GACAACCACATGTGCCTGG | 5467 | CCAGGCACATGTGGTTGTC |
| 1907 | ACAACCACATGTGCCTGGA | 5468 | TCCAGGCACATGTGGTTGT |
| 1908 | CAACCACATGTGCCTGGAC | 5469 | GTCCAGGCACATGTGGTTG |
| 1909 | AACCACATGTGCCTGGACT | 5470 | AGTCCAGGCACATGTGGTT |
| 1910 | ACCACATGTGCCTGGACTC | 5471 | GAGTCCAGGCACATGTGGT |
| 1911 | CCACATGTGCCTGGACTCT | 5472 | AGAGTCCAGGCACATGTGG |
| 1912 | CACATGTGCCTGGACTCTG | 5473 | CAGAGTCCAGGCACATGTG |
| 1913 | ACATGTGCCTGGACTCTGG | 5474 | CCAGAGTCCAGGCACATGT |
| 1914 | CATGTGCCTGGACTCTGGT | 5475 | ACCAGAGTCCAGGCACATG |
| 1915 | ATGTGCCTGGACTCTGGTG | 5476 | CACCAGAGTCCAGGCACAT |
| 1916 | TGTGCCTGGACTCTGGTGC | 5477 | GCACCAGAGTCCAGGCACA |
| 1917 | GTGCCTGGACTCTGGTGCC | 5478 | GGCACCAGAGTCCAGGCAC |
| 1918 | TGCCTGGACTCTGGTGCCG | 5479 | CGGCACCAGAGTCCAGGCA |
| 1919 | GCCTGGACTCTGGTGCCGC | 5480 | GCGGCACCAGAGTCCAGGC |
| 1920 | CCTGGACTCTGGTGCCGCG | 5481 | CGCGGCACCAGAGTCCAGG |
| 1921 | CTGGACTCTGGTGCCGCGG | 5482 | CCGCGGCACCAGAGTCCAG |
| 1922 | TGGACTCTGGTGCCGCGGG | 5483 | CCCGCGGCACCAGAGTCCA |
| 1923 | GGACTCTGGTGCCGCGGGC | 5484 | GCCCGCGGCACCAGAGTCC |
| 1924 | GACTCTGGTGCCGCGGGCA | 5485 | TGCCCGCGGCACCAGAGTC |
| 1925 | ACTCTGGTGCCGCGGGCAT | 5486 | ATGCCCGCGGCACCAGAGT |
| 1926 | CTCTGGTGCCGCGGGCATC | 5487 | GATGCCCGCGGCACCAGAG |
| 1927 | TCTGGTGCCGCGGGCATCT | 5488 | AGATGCCCGCGGCACCAGA |
| 1928 | CTGGTGCCGCGGGCATCTA | 5489 | TAGATGCCCGCGGCACCAG |
| 1929 | TGGTGCCGCGGGCATCTAC | 5490 | GTAGATGCCCGCGGCACCA |
| 1930 | GGTGCCGCGGGCATCTACA | 5491 | TGTAGATGCCCGCGGCACC |
| 1931 | GTGCCGCGGGCATCTACAC | 5492 | GTGTAGATGCCCGCGGCAC |
| 1932 | TGCCGCGGGCATCTACACA | 5493 | TGTGTAGATGCCCGCGGCA |
| 1933 | GCCGCGGGCATCTACACAG | 5494 | CTGTGTAGATGCCCGCGGC |
| 1934 | CCGCGGGCATCTACACAGA | 5495 | TCTGTGTAGATGCCCGCGG |
| 1935 | CGCGGGCATCTACACAGAG | 5496 | CTCTGTGTAGATGCCCGCG |
| 1936 | GCGGGCATCTACACAGAGG | 5497 | CCTCTGTGTAGATGCCCGC |
| 1937 | CGGGCATCTACACAGAGGA | 5498 | TCCTCTGTGTAGATGCCCG |
| 1938 | GGGCATCTACACAGAGGAC | 5499 | GTCCTCTGTGTAGATGCCC |
| 1939 | GGCATCTACACAGAGGACA | 5500 | TGTCCTCTGTGTAGATGCC |
| 1940 | GCATCTACACAGAGGACAT | 5501 | ATGTCCTCTGTGTAGATGC |
| 1941 | CATCTACACAGAGGACATA | 5502 | TATGTCCTCTGTGTAGATG |
| 1942 | ATCTACACAGAGGACATAA | 5503 | TTATGTCCTCTGTGTAGAT |
| 1943 | TCTACACAGAGGACATAAC | 5504 | GTTATGTCCTCTGTGTAGA |
| 1944 | CTACACAGAGGACATAACT | 5505 | AGTTATGTCCTCTGTGTAG |
| 1945 | TACACAGAGGACATAACTG | 5506 | CAGTTATGTCCTCTGTGTA |
| 1946 | ACACAGAGGACATAACTGG | 5507 | CCAGTTATGTCCTCTGTGT |
| 1947 | CACAGAGGACATAACTGGT | 5508 | ACCAGTTATGTCCTCTGTG |
| 1948 | ACAGAGGACATAACTGGTG | 5509 | CACCAGTTATGTCCTCTGT |
| 1949 | CAGAGGACATAACTGGTGA | 5510 | TCACCAGTTATGTCCTCTG |
| 1950 | AGAGGACATAACTGGTGAC | 5511 | GTCACCAGTTATGTCCTCT |
| 1951 | GAGGACATAACTGGTGACA | 5512 | TGTCACCAGTTATGTCCTC |
| 1952 | AGGACATAACTGGTGACAC | 5513 | GTGTCACCAGTTATGTCCT |
| 1953 | GGACATAACTGGTGACACG | 5514 | CGTGTCACCAGTTATGTCC |
| 1954 | GACATAACTGGTGACACGT | 5515 | ACGTGTCACCAGTTATGTC |
| 1955 | ACATAACTGGTGACACGTA | 5516 | TACGTGTCACCAGTTATGT |
| 1956 | CATAACTGGTGACACGTAT | 5517 | ATACGTGTCACCAGTTATG |
| 1957 | ATAACTGGTGACACGTATG | 5518 | CATACGTGTCACCAGTTAT |
| 1958 | TAACTGGTGACACGTATGG | 5519 | CCATACGTGTCACCAGTTA |
| 1959 | AACTGGTGACACGTATGGG | 5520 | CCCATACGTGTCACCAGTT |
| 1960 | ACTGGTGACACGTATGGGC | 5521 | GCCCATACGTGTCACCAGT |
| 1961 | CTGGTGACACGTATGGGCC | 5522 | GGCCCATACGTGTCACCAG |
| 1962 | TGGTGACACGTATGGGCCT | 5523 | AGGCCCATACGTGTGACCA |
| 1963 | GGTGACACGTATGGGCCTG | 5524 | CAGGCCCATACGTGTCACC |
| 1964 | GTGACACGTATGGGCCTGT | 5525 | ACAGGCCCATACGTGTCAC |
| 1965 | TGACACGTATGGGCCTGTC | 5526 | GACAGGCCCATACGTGTCA |
| 1966 | GACACGTATGGGCCTGTCA | 5527 | TGACAGGCCCATACGTGTC |
| 1967 | ACACGTATGGGCCTGTCAC | 5528 | GTGACAGGCCCATACGTGT |
| 1968 | CACGTATGGGCCTGTCACT | 5529 | AGTGACAGGCCCATACGTG |
| 1969 | ACGTATGGGCCTGTCACTG | 5530 | CAGTGACAGGCCCATACGT |
| 1970 | CGTATGGGCCTGTCACTGA | 5531 | TCAGTGACAGGCCCATACG |
| 1971 | GTATGGGCCTGTCACTGAA | 5532 | TTCAGTGACAGGCCCATAC |
| 1972 | TATGGGCCTGTCACTGAAG | 5533 | CTTCAGTGACAGGCCCATA |
| 1973 | ATGGGCCTGTCACTGAAGA | 5534 | TCTTCAGTGACAGGCCCAT |
| 1974 | TGGGCCTGTCACTGAAGAC | 5535 | GTCTTCAGTGACAGGCCCA |
| 1975 | GGGCCTGTCACTGAAGACC | 5536 | GGTCTTCAGTGACAGGCCC |
| 1976 | GGCCTGTCACTGAAGACCA | 5537 | TGGTCTTCAGTGACAGGCC |
| 1977 | GCCTGTCACTGAAGACCAA | 5538 | TTGGTCTTCAGTGACAGGC |
| 1978 | CCTGTCACTGAAGACCAAG | 5539 | CTTGGTCTTCAGTGACAGG |
| 1979 | CTGTCACTGAAGACCAAGC | 5540 | GCTTGGTCTTCAGTGACAG |
| 1980 | TGTCACTGAAGACCAAGCT | 5541 | AGCTTGGTCTTCAGTGACA |
| 1981 | GTCACTGAAGACCAAGCTG | 5542 | CAGCTTGGTCTTCAGTGAC |
| 1982 | TCACTGAAGACCAAGCTGG | 5543 | CCAGCTTGGTCTTCAGTGA |
| 1983 | CACTGAAGACCAAGCTGGA | 5544 | TCCAGCTTGGTCTTCAGTG |
| 1984 | ACTGAAGACCAAGCTGGAG | 5545 | CTCCAGCTTGGTCTTCAGT |
| 1985 | CTGAAGACCAAGCTGGAGT | 5546 | ACTCCAGCTTGGTCTTCAG |
| 1986 | TGAAGACCAAGCTGGAGTT | 5547 | AACTCCAGCTTGGTCTTCA |
| 1987 | GAAGACCAAGCTGGAGTTT | 5548 | AAACTCCAGCTTGGTCTTC |
| 1988 | AAGACCAAGCTGGAGTTTC | 5549 | GAAACTCCAGCTTGGTCTT |
| 1989 | AGACCAAGCTGGAGTTTCA | 5550 | TGAAACTCCAGCTTGGTCT |
| 1990 | GACCAAGCTGGAGTTTCAA | 5551 | TTGAAACTCCAGCTTGGTC |
| 1991 | ACCAAGCTGGAGTTTCAAA | 5552 | TTTGAAACTCCAGCTTGGT |
| 1992 | CCAAGCTGGAGTTTCAAAT | 5553 | ATTTGAAACTCCAGCTTGG |
| 1993 | CAAGCTGGAGTTTCAAATG | 5554 | CATTTGAAACTCCAGCTTG |
| 1994 | AAGCTGGAGTTTCAAATGT | 5555 | ACATTTGAAACTCCAGCTT |
| 1995 | AGCTGGAGTTTCAAATGTT | 5556 | AACATTTGAAACTCCAGCT |
| 1996 | GCTGGAGTTTCAAATGTTG | 5557 | CAACATTTGAAACTCCAGC |
| 1997 | CTGGAGTTTCAAATGTTGG | 5558 | CCAACATTTGAAACTCCAG |
| 1998 | TGGAGTTTCAAATGTTGGT | 5559 | ACCAACATTTGAAACTCCA |
| 1999 | GGAGTTTCAAATGTTGGTC | 5560 | GACCAACATTTGAAACTCC |
| 2000 | GAGTTTCAAATGTTGGTCT | 5561 | AGACCAACATTTGAAACTC |
| 2001 | AGTTTCAAATGTTGGTCTT | 5562 | AAGACCAACATTTGAAACT |
| 2002 | GTTTCAAATGTTGGTCTTG | 5563 | CAAGACCAACATTTGAAAC |
| 2003 | TTTCAAATGTTGGTCTTGG | 5564 | CCAAGACCAACATTTGAAA |
| 2004 | TTCAAATGTTGGTCTTGGA | 5565 | TCCAAGACCAACATTTGAA |
| 2005 | TCAAATGTTGGTCTTGGAC | 5566 | GTCCAAGACCAACATTTGA |
| 2006 | CAAATGTTGGTCTTGGACC | 5567 | GGTCCAAGACCAACATTTG |
| 2007 | AAATGTTGGTCTTGGACCA | 5568 | TGGTCCAAGACCAACATTT |
| 2008 | AATGTTGGTCTTGGACCAG | 5569 | CTGGTCCAAGACCAACATT |
| 2009 | ATGTTGGTCTTGGACCAGC | 5570 | GCTGGTCCAAGACCAACAT |
| 2010 | TGTTGGTCTTGGACCAGCA | 5571 | TGCTGGTCCAAGACCAACA |
| 2011 | GTTGGTCTTGGACCAGCAG | 5572 | CTGCTGGTCCAAGACCAAC |
| 2012 | TTGGTCTTGGACCAGCAGG | 5573 | CCTGCTGGTCCAAGACCAA |
| 2013 | TGGTCTTGGACCAGCAGGG | 5574 | CCCTGCTGGTCCAAGACCA |
| 2014 | GGTCTTGGACCAGCAGGGA | 5575 | TCCCTGCTGGTCCAAGACC |
| 2015 | GTCTTGGACCAGCAGGGAT | 5576 | ATCCCTGCTGGTCCAAGAC |
| 2016 | TCTTGGACCAGCAGGGATT | 5577 | AATCCCTGCTGGTCCAAGA |
| 2017 | CTTGGACCAGCAGGGATTG | 5578 | CAATCCCTGCTGGTCCAAG |
| 2018 | TTGGACCAGCAGGGATTGG | 5579 | CCAATCCCTGCTGGTCCAA |
| 2019 | TGGACCAGCAGGGATTGGC | 5580 | GCCAATCCCTGCTGGTCCA |
| 2020 | GGACCAGCAGGGATTGGCA | 5581 | TGCCAATCCCTGCTGGTCC |
| 2021 | GACCAGCAGGGATTGGCAT | 5582 | ATGCCAATCCCTGCTGGTC |
| 2022 | ACCAGCAGGGATTGGCATG | 5583 | CATGCCAATCCCTGCTGGT |
| 2023 | CCAGCAGGGATTGGCATGA | 5584 | TCATGCCAATCCCTGCTGG |
| 2024 | CAGCAGGGATTGGCATGAT | 5585 | ATCATGCCAATCCCTGCTG |
| 2025 | AGCAGGGATTGGCATGATG | 5586 | CATCATGCCAATCCCTGCT |
| 2026 | GCAGGGATTGGCATGATGG | 5587 | CCATCATGCCAATCCCTGC |
| 2027 | CAGGGATTGGCATGATGGT | 5588 | ACCATCATGCCAATCCCTG |
| 2028 | AGGGATTGGCATGATGGTT | 5589 | AACCATCATGCCAATCCCT |
| 2029 | GGGATTGGCATGATGGTTC | 5590 | GAACCATCATGCCAATCCC |
| 2030 | GGATTGGCATGATGGTTCT | 5591 | AGAACCATCATGCCAATCC |
| 2031 | GATTGGCATGATGGTTCTG | 5592 | CAGAACCATCATGCCAATC |
| 2032 | ATTGGCATGATGGTTCTGG | 5593 | CCAGAACCATCATGCCAAT |
| 2033 | TTGGCATGATGGTTCTGGG | 5594 | CCCAGAACCATCATGCCAA |
| 2034 | TGGCATGATGGTTCTGGGC | 5595 | GCCCAGAACCATCATGCCA |
| 2035 | GGCATGATGGTTCTGGGCA | 5596 | TGCCCAGAACCATCATGCC |
| 2036 | GCATGATGGTTCTGGGCAT | 5597 | ATGCCCAGAACCATCATGC |
| 2037 | CATGATGGTTCTGGGCATC | 5598 | GATGCCCAGAACCATCATG |
| 2038 | ATGATGGTTCTGGGCATCC | 5599 | GGATGCCCAGAACCATCAT |
| 2039 | TGATGGTTCTGGGCATCCT | 5600 | AGGATGCCCAGAACCATCA |
| 2040 | GATGGTTCTGGGCATCCTG | 5601 | CAGGATGCCCAGAACCATC |
| 2041 | ATGGTTCTGGGCATCCTGC | 5602 | GCAGGATGCCCAGAACCAT |
| 2042 | TGGTTCTGGGCATCCTGCT | 5603 | AGCAGGATGCCCAGAACCA |
| 2043 | GGTTCTGGGCATCCTGCTA | 5604 | TAGCAGGATGCCCAGAACC |
| 2044 | GTTCTGGGCATCCTGCTAC | 5605 | GTAGCAGGATGCCCAGAAC |
| 2045 | TTCTGGGCATCCTGCTACT | 5606 | AGTAGCAGGATGCCCAGAA |
| 2046 | TCTGGGCATCCTGCTACTG | 5607 | CAGTAGCAGGATGCCCAGA |
| 2047 | CTGGGCATCCTGCTACTGA | 5608 | TCAGTAGCAGGATGCCCAG |
| 2048 | TGGGCATCCTGCTACTGAT | 5609 | ATCAGTAGCAGGATGCCCA |
| 2049 | GGGCATCCTGCTACTGATT | 5610 | AATCAGTAGCAGGATGCCC |
| 2050 | GGCATCCTGCTACTGATTT | 5611 | AAATCAGTAGCAGGATGCC |
| 2051 | GCATCCTGCTACTGATTTT | 5612 | AAAATCAGTAGCAGGATGC |
| 2052 | CATCCTGCTACTGATTTTG | 5613 | CAAAATCAGTAGCAGGATG |
| 2053 | ATCCTGCTACTGATTTTGG | 5614 | CCAAAATCAGTAGCAGGAT |
| 2054 | TCCTGCTACTGATTTTGGC | 5615 | GCCAAAATCAGTAGCAGGA |
| 2055 | CCTGCTACTGATTTTGGCT | 5616 | AGCCAAAATCAGTAGCAGG |
| 2056 | CTGCTACTGATTTTGGCTC | 5617 | GAGCCAAAATCAGTAGCAG |
| 2057 | TGCTACTGATTTTGGCTCC | 5618 | GGAGCCAAAATCAGTAGCA |
| 2058 | GCTACTGATTTTGGCTCCA | 5619 | TGGAGCCAAAATCAGTAGC |
| 2059 | CTACTGATTTTGGCTCCAC | 5620 | GTGGAGCCAAAATCAGTAG |
| 2060 | TACTGATTTTGGCTCCACT | 5621 | AGTGGAGCCAAAATCAGTA |
| 2061 | ACTGATTTTGGCTCCACTC | 5622 | GAGTGGAGCCAAAATCAGT |
| 2062 | CTGATTTTGGCTCCACTCT | 5623 | AGAGTGGAGCCAAAATCAG |
| 2063 | TGATTTTGGCTCCACTCTT | 5624 | AAGAGTGGAGCCAAAATCA |
| 2064 | GATTTTGGCTCCACTCTTG | 5625 | CAAGAGTGGAGCCAAAATC |
| 2065 | ATTTTGGCTCCACTCTTGC | 5626 | GCAAGAGTGGAGCCAAAAT |
| 2066 | TTTTGGCTCCACTCTTGCT | 5627 | AGCAAGAGTGGAGCCAAAA |
| 2067 | TTTGGCTCCACTCTTGCTG | 5628 | CAGCAAGAGTGGAGCCAAA |
| 2068 | TTGGCTCCACTCTTGCTGC | 5629 | GCAGCAAGAGTGGAGCCAA |
| 2069 | TGGCTCCACTCTTGCTGCT | 5630 | AGCAGCAAGAGTGGAGCCA |
| 2070 | GGCTCCACTCTTGCTGCTC | 5631 | GAGCAGCAAGAGTGGAGCC |
| 2071 | GCTCCACTCTTGCTGCTCC | 5632 | GGAGCAGCAAGAGTGGAGC |
| 2072 | CTCCACTCTTGCTGCTCCT | 5633 | AGGAGCAGCAAGAGTGGAG |
| 2073 | TCCACTCTTGCTGCTCCTG | 5634 | CAGGAGCAGCAAGAGTGGA |
| 2074 | CCACTCTTGCTGCTCCTGT | 5635 | ACAGGAGCAGCAAGAGTGG |
| 2075 | CACTCTTGCTGCTCCTGTG | 5636 | CACAGGAGCAGCAAGAGTG |
| 2076 | ACTCTTGCTGCTCCTGTGT | 5637 | ACACAGGAGCAGCAAGAGT |
| 2077 | CTCTTGCTGCTCCTGTGTT | 5638 | AACACAGGAGCAGCAAGAG |
| 2078 | TCTTGCTGCTCCTGTGTTG | 5639 | CAACACAGGAGCAGCAAGA |
| 2079 | CTTGCTGCTCCTGTGTTGC | 5640 | GCAACACAGGAGCAGCAAG |
| 2080 | TTGCTGCTCCTGTGTTGCT | 5641 | AGCAACACAGGAGCAGCAA |
| 2081 | TGCTGCTCCTGTGTTGCTG | 5642 | CAGCAACACAGGAGCAGCA |
| 2082 | GCTGCTCCTGTGTTGCTGC | 5643 | GCAGCAACACAGGAGCAGC |
| 2083 | CTGCTCCTGTGTTGCTGCA | 5644 | TGCAGCAACACAGGAGCAG |
| 2084 | TGCTCCTGTGTTGCTGCAA | 5645 | TTGCAGCAACACAGGAGCA |
| 2085 | GCTCCTGTGTTGCTGCAAA | 5646 | TTTGCAGCAACACAGGAGC |
| 2086 | CTCCTGTGTTGCTGCAAAC | 5647 | GTTTGCAGCAACACAGGAG |
| 2087 | TCCTGTGTTGCTGCAAACA | 5648 | TGTTTGCAGCAACACAGGA |
| 2088 | CCTGTGTTGCTGCAAACAG | 5649 | CTGTTTGCAGCAACACAGG |
| 2089 | CTGTGTTGCTGCAAACAGA | 5650 | TCTGTTTGCAGCAACACAG |
| 2090 | TGTGTTGCTGCAAACAGAG | 5651 | CTCTGTTTGCAGCAACACA |
| 2091 | GTGTTGCTGCAAACAGAGA | 5652 | TCTCTGTTTGCAGCAACAC |
| 2092 | TGTTGCTGCAAACAGAGAC | 5653 | GTCTCTGTTTGCAGCAACA |
| 2093 | GTTGCTGCAAACAGAGACA | 5654 | TGTCTCTGTTTGCAGCAAC |
| 2094 | TTGCTGCAAACAGAGACAG | 5655 | CTGTCTCTGTTTGCAGCAA |
| 2095 | TGCTGCAAACAGAGACAGC | 5656 | GCTGTCTCTGTTTGCAGCA |
| 2096 | GCTGCAAACAGAGACAGCC | 5657 | GGCTGTCTCTGTTTGCAGC |
| 2097 | CTGCAAACAGAGACAGCCA | 5658 | TGGCTGTCTCTGTTTGCAG |
| 2098 | TGCAAACAGAGACAGCCAG | 5659 | CTGGCTGTCTCTGTTTGCA |
| 2099 | GCAAACAGAGACAGCCAGA | 5660 | TCTGGCTGTCTCTGTTTGC |
| 2100 | CAAACAGAGACAGCCAGAA | 5661 | TTCTGGCTGTCTCTGTTTG |
| 2101 | AAACAGAGACAGCCAGAAG | 5662 | CTTCTGGCTGTCTCTGTTT |
| 2102 | AACAGAGACAGCCAGAAGG | 5663 | CCTTCTGGCTGTCTCTGTT |
| 2103 | ACAGAGACAGCCAGAAGGC | 5664 | GCCTTCTGGCTGTCTCTGT |
| 2104 | CAGAGACAGCCAGAAGGCC | 5665 | GGCCTTCTGGCTGTCTCTG |
| 2105 | AGAGACAGCCAGAAGGCCT | 5666 | AGGCCTTCTGGCTGTCTCT |
| 2106 | GAGACAGCCAGAAGGCCTG | 5667 | CAGGCCTTCTGGCTGTCTC |
| 2107 | AGACAGCCAGAAGGCCTGG | 5668 | CCAGGCCTTCTGGCTGTCT |
| 2108 | GACAGCCAGAAGGCCTGGG | 5669 | CCCAGGCCTTCTGGCTGTC |
| 2109 | ACAGCCAGAAGGCCTGGGA | 5670 | TCCCAGGCCTTCTGGCTGT |
| 2110 | CAGCCAGAAGGCCTGGGAA | 5671 | TTCCCAGGCCTTCTGGCTG |
| 2111 | AGCCAGAAGGCCTGGGAAC | 5672 | GTTCCCAGGCCTTCTGGCT |
| 2112 | GCCAGAAGGCCTGGGAACA | 5673 | TGTTCCCAGGCCTTCTGGC |
| 2113 | CCAGAAGGCCTGGGAACAA | 5674 | TTGTTCCCAGGCCTTCTGG |
| 2114 | CAGAAGGCCTGGGAACAAG | 5675 | CTTGTTCCCAGGCCTTCTG |
| 2115 | AGAAGGCCTGGGAACAAGA | 5676 | TCTTGTTCCCAGGCCTTCT |
| 2116 | GAAGGCCTGGGAACAAGAT | 5677 | ATCTTGTTCCCAGGCCTTC |
| 2117 | AAGGCCTGGGAACAAGATT | 5678 | AATCTTGTTCCCAGGCCTT |
| 2118 | AGGCCTGGGAACAAGATTT | 5679 | AAATCTTGTTCCCAGGCCT |
| 2119 | GGCCTGGGAACAAGATTTG | 5680 | CAAATCTTGTTCCCAGGCC |
| 2120 | GCCTGGGAACAAGATTTGC | 5681 | GCAAATCTTGTTCCCAGGC |
| 2121 | CCTGGGAACAAGATTTGCT | 5682 | AGCAAATCTTGTTCCCAGG |
| 2122 | CTGGGAACAAGATTTGCTC | 5683 | GAGCAAATCTTGTTCCCAG |
| 2123 | TGGGAACAAGATTTGCTCC | 5684 | GGAGCAAATCTTGTTCCCA |
| 2124 | GGGAACAAGATTTGCTCCT | 5685 | AGGAGCAAATCTTGTTCCC |
| 2125 | GGAACAAGATTTGCTCCTG | 5686 | CAGGAGCAAATCTTGTTCC |
| 2126 | GAACAAGATTTGCTCCTGT | 5687 | ACAGGAGCAAATCTTGTTC |
| 2127 | AACAAGATTTGCTCCTGTG | 5688 | CACAGGAGCAAATCTTGTT |
| 2128 | ACAAGATTTGCTCCTGTGC | 5689 | GCACAGGAGCAAATCTTGT |
| 2129 | CAAGATTTGCTCCTGTGCC | 5690 | GGCACAGGAGCAAATCTTG |
| 2130 | AAGATTTGCTCCTGTGCCT | 5691 | AGGCACAGGAGCAAATCTT |
| 2131 | AGATTTGCTCCTGTGCCTG | 5692 | CAGGCACAGGAGCAAATCT |
| 2132 | GATTTGCTCCTGTGCCTGA | 5693 | TCAGGCACAGGAGCAAATC |
| 2133 | ATTTGCTCCTGTGCCTGAG | 5694 | CTCAGGCACAGGAGCAAAT |
| 2134 | TTTGCTCCTGTGCCTGAGG | 5695 | CCTCAGGCACAGGAGCAAA |
| 2135 | TTGCTCCTGTGCCTGAGGG | 5696 | CCCTCAGGCACAGGAGCAA |
| 2136 | TGCTCCTGTGCCTGAGGGC | 5697 | GCCCTCAGGCACAGGAGCA |
| 2137 | GCTCCTGTGCCTGAGGGCG | 5698 | CGCCCTCAGGCACAGGAGC |
| 2138 | CTCCTGTGCCTGAGGGCGG | 5699 | CCGCCCTCAGGCACAGGAG |
| 2139 | TCCTGTGCCTGAGGGCGGA | 5700 | TCCGCCCTCAGGCACAGGA |
| 2140 | CCTGTGCCTGAGGGCGGAG | 5701 | CTCCGCCCTCAGGCACAGG |
| 2141 | CTGTGCCTGAGGGCGGAGA | 5702 | TCTCCGCCCTCAGGCACAG |
| 2142 | TGTGCCTGAGGGCGGAGAA | 5703 | TTCTCCGCCCTCAGGCACA |
| 2143 | GTGCCTGAGGGCGGAGAAG | 5704 | CTTCTCCGCCCTCAGGCAC |
| 2144 | TGCCTGAGGGCGGAGAAGG | 5705 | CCTTCTCCGCCCTCAGGCA |
| 2145 | GCCTGAGGGCGGAGAAGGA | 5706 | TCCTTCTCCGCCCTCAGGC |
| 2146 | CCTGAGGGCGGAGAAGGAG | 5707 | CTCCTTCTCCGCCCTCAGG |
| 2147 | CTGAGGGCGGAGAAGGAGT | 5708 | ACTCCTTCTCCGCCCTCAG |
| 2148 | TGAGGGCGGAGAAGGAGTG | 5709 | CACTCCTTCTCCGCCCTCA |
| 2149 | GAGGGCGGAGAAGGAGTGA | 5710 | TCACTCCTTCTCCGCCCTC |
| 2150 | AGGGCGGAGAAGGAGTGAT | 5711 | ATCACTCCTTCTCCGCCCT |
| 2151 | GGGCGGAGAAGGAGTGATG | 5712 | CATCACTCCTTCTCCGCCC |
| 2152 | GGCGGAGAAGGAGTGATGC | 5713 | GCATCACTCCTTCTCCGCC |
| 2153 | GCGGAGAAGGAGTGATGCA | 5714 | TGCATCACTCCTTCTCCGC |
| 2154 | CGGAGAAGGAGTGATGCAG | 5715 | CTGCATCACTCCTTCTCCG |
| 2155 | GGAGAAGGAGTGATGCAGT | 5716 | ACTGCATCACTCCTTCTCC |
| 2156 | GAGAAGGAGTGATGCAGTC | 5717 | GACTGCATCACTCCTTCTC |
| 2157 | AGAAGGAGTGATGCAGTCT | 5718 | AGACTGCATCACTCCTTCT |
| 2158 | GAAGGAGTGATGCAGTCTT | 5719 | AAGACTGCATCACTCCTTC |
| 2159 | AAGGAGTGATGCAGTCTTG | 5720 | CAAGACTGCATCACTCCTT |
| 2160 | AGGAGTGATGCAGTCTTGG | 5721 | CCAAGACTGCATCACTCCT |
| 2161 | GGAGTGATGCAGTCTTGGA | 5722 | TCCAAGACTGCATCACTCC |
| 2162 | GAGTGATGCAGTCTTGGAG | 5723 | CTCCAAGACTGCATCACTC |
| 2163 | AGTGATGCAGTCTTGGAGA | 5724 | TCTCCAAGACTGCATCACT |
| 2164 | GTGATGCAGTCTTGGAGAA | 5725 | TTCTCCAAGACTGCATCAC |
| 2165 | TGATGCAGTCTTGGAGAAT | 5726 | ATTCTCCAAGACTGCATCA |
| 2166 | GATGCAGTCTTGGAGAATT | 5727 | AATTCTCCAAGACTGCATC |
| 2167 | ATGCAGTCTTGGAGAATTG | 5728 | CAATTCTCCAAGACTGCAT |
| 2168 | TGCAGTCTTGGAGAATTGA | 5729 | TCAATTCTCCAAGACTGCA |
| 2169 | GCAGTCTTGGAGAATTGAA | 5730 | TTCAATTCTCCAAGACTGC |
| 2170 | CAGTCTTGGAGAATTGAAG | 5731 | CTTCAATTCTCCAAGACTG |
| 2171 | AGTCTTGGAGAATTGAAGG | 5732 | CCTTCAATTCTCCAAGACT |
| 2172 | GTCTTGGAGAATTGAAGGG | 5733 | CCCTTCAATTCTCCAAGAC |
| 2173 | TCTTGGAGAATTGAAGGGG | 5734 | CCCCTTCAATTCTCCAAGA |
| 2174 | CTTGGAGAATTGAAGGGGC | 5735 | GCCCCTTCAATTCTCCAAG |
| 2175 | TTGGAGAATTGAAGGGGCC | 5736 | GGCCCCTTCAATTCTCCAA |
| 2176 | TGGAGAATTGAAGGGGCCC | 5737 | GGGCCCCTTCAATTCTCCA |
| 2177 | GGAGAATTGAAGGGGCCCA | 5738 | TGGGCCCCTTCAATTCTCC |
| 2178 | GAGAATTGAAGGGGCCCAT | 5739 | ATGGGCCCCTTCAATTCTC |
| 2179 | AGAATTGAAGGGGCCCATC | 5740 | GATGGGCCCCTTCAATTCT |
| 2180 | GAATTGAAGGGGCCCATCC | 5741 | GGATGGGCCCCTTCAATTC |
| 2181 | AATTGAAGGGGCCCATCCC | 5742 | GGGATGGGCCCCTTCAATT |
| 2182 | ATTGAAGGGGCCCATCCCG | 5743 | CGGGATGGGCCCCTTCAAT |
| 2183 | TTGAAGGGGCCCATCCCGA | 5744 | TCGGGATGGGCCCCTTCAA |
| 2184 | TGAAGGGGCCCATCCCGAG | 5745 | CTCGGGATGGGCCCCTTCA |
| 2185 | GAAGGGGCCCATCCCGAGG | 5746 | CCTCGGGATGGGCCCCTTC |
| 2186 | AAGGGGCCCATCCCGAGGA | 5747 | TCCTCGGGATGGGCCCCTT |
| 2187 | AGGGGCCCATCCCGAGGAC | 5748 | GTCCTCGGGATGGGCCCCT |
| 2188 | GGGGCCCATCCCGAGGACA | 5749 | TGTCCTCGGGATGGGCCCC |
| 2189 | GGGCCCATCCCGAGGACAG | 5750 | CTGTCCTCGGGATGGGCCC |
| 2190 | GGCCCATCCCGAGGACAGG | 5751 | CCTGTCCTCGGGATGGGCC |
| 2191 | GCCCATCCCGAGGACAGGG | 5752 | CCCTGTCCTCGGGATGGGC |
| 2192 | CCCATCCCGAGGACAGGGA | 5753 | TCCCTGTCCTCGGGATGGG |
| 2193 | CCATCCCGAGGACAGGGAT | 5754 | ATCCCTGTCCTCGGGATGG |
| 2194 | CATCCCGAGGACAGGGATG | 5755 | CATCCCTGTCCTCGGGATG |
| 2195 | ATCCCGAGGACAGGGATGT | 5756 | ACATCCCTGTCCTCGGGAT |
| 2196 | TCCCGAGGACAGGGATGTG | 5757 | CACATCCCTGTCCTCGGGA |
| 2197 | CCCGAGGACAGGGATGTGT | 5758 | ACACATCCCTGTCCTCGGG |
| 2198 | CCGAGGACAGGGATGTGTC | 5759 | GACACATCCCTGTCCTCGG |
| 2199 | CGAGGACAGGGATGTGTCA | 5760 | TGACACATCCCTGTCCTCG |
| 2200 | GAGGACAGGGATGTGTCAA | 5761 | TTGACACATCCCTGTCCTC |
| 2201 | AGGACAGGGATGTGTCAAA | 5762 | TTTGACACATCCCTGTCCT |
| 2202 | GGACAGGGATGTGTCAAAT | 5763 | ATTTGACACATCCCTGTCC |
| 2203 | GACAGGGATGTGTCAAATA | 5764 | TATTTGACACATCCCTGTC |
| 2204 | ACAGGGATGTGTCAAATAT | 5765 | ATATTTGACACATCCCTGT |
| 2205 | CAGGGATGTGTCAAATATA | 5766 | TATATTTGACACATCCCTG |
| 2206 | AGGGATGTGTCAAATATAT | 5767 | ATATATTTGACACATCCCT |
| 2207 | GGGATGTGTCAAATATATG | 5768 | CATATATTTGACACATCCC |
| 2208 | GGATGTGTCAAATATATGT | 5769 | ACATATATTTGACACATCC |
| 2209 | GATGTGTCAAATATATGTG | 5770 | CACATATATTTGACACATC |
| 2210 | ATGTGTCAAATATATGTGC | 5771 | GCACATATATTTGACACAT |
| 2211 | TGTGTCAAATATATGTGCA | 5772 | TGCACATATATTTGACACA |
| 2212 | GTGTCAAATATATGTGCAC | 5773 | GTGCACATATATTTGACAC |
| 2213 | TGTCAAATATATGTGCACC | 5774 | GGTGCACATATATTTGACA |
| 2214 | GTCAAATATATGTGCACCC | 5775 | GGGTGCACATATATTTGAC |
| 2215 | TCAAATATATGTGCACCCA | 5776 | TGGGTGCACATATATTTGA |
| 2216 | CAAATATATGTGCACCCAT | 5777 | ATGGGTGCACATATATTTG |
| 2217 | AAATATATGTGCACCCATG | 5778 | CATGGGTGCACATATATTT |
| 2218 | AATATATGTGCACCCATGA | 5779 | TCATGGGTGCACATATATT |
| 2219 | ATATATGTGCACCCATGAC | 5780 | GTCATGGGTGCACATATAT |
| 2220 | TATATGTGCACCCATGACA | 5781 | TGTCATGGGTGCACATATA |
| 2221 | ATATGTGCACCCATGACAG | 5782 | CTGTCATGGGTGCACATAT |
| 2222 | TATGTGCACCCATGACAGC | 5783 | GCTGTCATGGGTGCACATA |
| 2223 | ATGTGCACCCATGACAGCC | 5784 | GGCTGTCATGGGTGCACAT |
| 2224 | TGTGCACCCATGACAGCCT | 5785 | AGGCTGTCATGGGTGCACA |
| 2225 | GTGCACCCATGACAGCCTC | 5786 | GAGGCTGTCATGGGTGCAC |
| 2226 | TGCACCCATGACAGCCTCA | 5787 | TGAGGCTGTCATGGGTGCA |
| 2227 | GCACCCATGACAGCCTCAA | 5788 | TTGAGGCTGTCATGGGTGC |
| 2228 | CACCCATGACAGCCTCAAA | 5789 | TTTGAGGCTGTCATGGGTG |
| 2229 | ACCCATGACAGCCTCAAAT | 5790 | ATTTGAGGCTGTCATGGGT |
| 2230 | CCCATGACAGCCTCAAATA | 5791 | TATTTGAGGCTGTCATGGG |
| 2231 | CCATGACAGCCTCAAATAC | 5792 | GTATTTGAGGCTGTCATGG |
| 2232 | CATGACAGCCTCAAATACC | 5793 | GGTATTTGAGGCTGTCATG |
| 2233 | ATGACAGCCTCAAATACCC | 5794 | GGGTATTTGAGGCTGTCAT |
| 2234 | TGACAGCCTCAAATACCCA | 5795 | TGGGTATTTGAGGCTGTCA |
| 2235 | GACAGCCTCAAATACCCAG | 5796 | CTGGGTATTTGAGGCTGTC |
| 2236 | ACAGCCTCAAATACCCAGG | 5797 | CCTGGGTATTTGAGGCTGT |
| 2237 | CAGCCTCAAATACCCAGGA | 5798 | TCCTGGGTATTTGAGGCTG |
| 2238 | AGCCTCAAATACCCAGGAT | 5799 | ATCCTGGGTATTTGAGGCT |
| 2239 | GCCTCAAATACCCAGGATC | 5800 | GATCCTGGGTATTTGAGGC |
| 2240 | CCTCAAATACCCAGGATCG | 5801 | CGATCCTGGGTATTTGAGG |
| 2241 | CTCAAATACCCAGGATCGG | 5802 | CCGATCCTGGGTATTTGAG |
| 2242 | TCAAATACCCAGGATCGGA | 5803 | TCCGATCCTGGGTATTTGA |
| 2243 | CAAATACCCAGGATCGGAT | 5804 | ATCCGATCCTGGGTATTTG |
| 2244 | AAATACCCAGGATCGGATG | 5805 | CATCCGATCCTGGGTATTT |
| 2245 | AATACCCAGGATCGGATGG | 5806 | CCATCCGATCCTGGGTATT |
| 2246 | ATACCCAGGATCGGATGGA | 5807 | TCCATCCGATCCTGGGTAT |
| 2247 | TACCCAGGATCGGATGGAT | 5808 | ATCCATCCGATCCTGGGTA |
| 2248 | ACCCAGGATCGGATGGATT | 5809 | AATCCATCCGATCCTGGGT |
| 2249 | CCCAGGATCGGATGGATTC | 5810 | GAATCCATCCGATCCTGGG |
| 2250 | CCAGGATCGGATGGATTCC | 5811 | GGAATCCATCCGATCCTGG |
| 2251 | CAGGATCGGATGGATTCCT | 5812 | AGGAATCCATCCGATCCTG |
| 2252 | AGGATCGGATGGATTCCTC | 5813 | GAGGAATCCATCCGATCCT |
| 2253 | GGATCGGATGGATTCCTCT | 5814 | AGAGGAATCCATCCGATCC |
| 2254 | GATCGGATGGATTCCTCTG | 5815 | CAGAGGAATCCATCCGATC |
| 2255 | ATCGGATGGATTCCTCTGA | 5816 | TCAGAGGAATCCATCCGAT |
| 2256 | TCGGATGGATTCCTCTGAA | 5817 | TTCAGAGGAATCCATCCGA |
| 2257 | CGGATGGATTCCTCTGAAA | 5818 | TTTCAGAGGAATCCATCCG |
| 2258 | GGATGGATTCCTCTGAAAT | 5819 | ATTTCAGAGGAATCCATCC |
| 2259 | GATGGATTCCTCTGAAATC | 5820 | GATTTCAGAGGAATCCATC |
| 2260 | ATGGATTCCTCTGAAATCT | 5821 | AGATTTCAGAGGAATCCAT |
| 2261 | TGGATTCCTCTGAAATCTA | 5822 | TAGATTTCAGAGGAATCCA |
| 2262 | GGATTCCTCTGAAATCTAC | 5823 | GTAGATTTCAGAGGAATCC |
| 2263 | GATTCCTCTGAAATCTACA | 5824 | TGTAGATTTCAGAGGAATC |
| 2264 | ATTCCTCTGAAATCTACAC | 5825 | GTGTAGATTTCAGAGGAAT |
| 2265 | TTCCTCTGAAATCTACACC | 5826 | GGTGTAGATTTCAGAGGAA |
| 2266 | TCCTCTGAAATCTACACCA | 5827 | TGGTGTAGATTTCAGAGGA |
| 2267 | CCTCTGAAATCTACACCAA | 5828 | TTGGTGTAGATTTCAGAGG |
| 2268 | CTCTGAAATCTACACCAAC | 5829 | GTTGGTGTAGATTTCAGAG |
| 2269 | TCTGAAATCTACACCAACA | 5830 | TGTTGGTGTAGATTTCAGA |
| 2270 | CTGAAATCTACACCAACAC | 5831 | GTGTTGGTGTAGATTTCAG |
| 2271 | TGAAATCTACACCAACACC | 5832 | GGTGTTGGTGTAGATTTCA |
| 2272 | GAAATCTACACCAACACCT | 5833 | AGGTGTTGGTGTAGATTTC |
| 2273 | AAATCTACACCAACACCTA | 5834 | TAGGTGTTGGTGTAGATTT |
| 2274 | AATCTACACCAACACCTAT | 5835 | ATAGGTGTTGGTGTAGATT |
| 2275 | ATCTACACCAACACCTATG | 5836 | CATAGGTGTTGGTGTAGAT |
| 2276 | TCTACACCAACACCTATGC | 5837 | GCATAGGTGTTGGTGTAGA |
| 2277 | CTACACCAACACCTATGCA | 5838 | TGCATAGGTGTTGGTGTAG |
| 2278 | TACACCAACACCTATGCAG | 5839 | CTGCATAGGTGTTGGTGTA |
| 2279 | ACACCAACACCTATGCAGC | 5840 | GCTGCATAGGTGTTGGTGT |
| 2280 | CACCAACACCTATGCAGCC | 5841 | GGCTGCATAGGTGTTGGTG |
| 2281 | ACCAACACCTATGCAGCCG | 5842 | CGGCTGCATAGGTGTTGGT |
| 2282 | CCAACACCTATGCAGCCGG | 5843 | CCGGCTGCATAGGTGTTGG |
| 2283 | CAACACCTATGCAGCCGGG | 5844 | CCCGGCTGCATAGGTGTTG |
| 2284 | AACACCTATGCAGCCGGGG | 5845 | CCCCGGCTGCATAGGTGTT |
| 2285 | ACACCTATGCAGCCGGGGG | 5846 | CCCCCGGCTGCATAGGTGT |
| 2286 | CACCTATGCAGCCGGGGGC | 5847 | GCCCCCGGCTGCATAGGTG |
| 2287 | ACCTATGCAGCCGGGGGCA | 5848 | TGCCCCCGGCTGCATAGGT |
| 2288 | CCTATGCAGCCGGGGGCAC | 5849 | GTGCCCCCGGCTGCATAGG |
| 2289 | CTATGCAGCCGGGGGCACG | 5850 | CGTGCCCCCGGCTGCATAG |
| 2290 | TATGCAGCCGGGGGCACGG | 5851 | CCGTGCCCCCGGCTGCATA |
| 2291 | ATGCAGCCGGGGGCACGGT | 5852 | ACCGTGCCCCCGGCTGCAT |
| 2292 | TGCAGCCGGGGGCACGGTG | 5853 | CACCGTGCCCCCGGCTGCA |
| 2293 | GCAGCCGGGGGCACGGTGG | 5854 | CCACCGTGCCCCCGGCTGC |
| 2294 | CAGCCGGGGGCACGGTGGA | 5855 | TCCACCGTGCCCCCGGCTG |
| 2295 | AGCCGGGGGCACGGTGGAA | 5856 | TTCCACCGTGCCCCCGGCT |
| 2296 | GCCGGGGGCACGGTGGAAG | 5857 | CTTCCACCGTGCCCCCGGC |
| 2297 | CCGGCGGCACGGTGGAAGG | 5858 | CCTTCCACCGTGCCCCCGG |
| 2298 | CGGGGGCACGGTGGAAGGA | 5859 | TCCTTCCACCGTGCCCCCG |
| 2299 | GGGGGCACGGTGGAAGGAG | 5860 | CTCCTTCCACCGTGCCCCC |
| 2300 | GGGGCACGGTGGAAGGAGG | 5861 | CCTCCTTCCACCGTGCCCC |
| 2301 | GGGCACGGTGGAAGGAGGT | 5862 | ACCTCCTTCCACCGTGCCC |
| 2302 | GGCACGGTGGAAGGAGGTG | 5863 | CACCTCCTTCCACCGTGCC |
| 2303 | GCACGGTGGAAGGAGGTGT | 5864 | ACACCTCCTTCCACCGTGC |
| 2304 | CACGGTGGAAGGAGGTGTA | 5865 | TACACCTCCTTCCACCGTG |
| 2305 | ACGGTGGAAGGAGGTGTAT | 5866 | ATACACCTCCTTCCACCGT |
| 2306 | CGGTGGAAGGAGGTGTATC | 5867 | GATACACCTCCTTCCACCG |
| 2307 | GGTGGAAGGAGGTGTATCG | 5868 | CGATACACCTCCTTCCACC |
| 2308 | GTGGAAGGAGGTGTATCGG | 5869 | CCGATACACCTCCTTCCAC |
| 2309 | TGGAAGGAGGTGTATCGGG | 5870 | CCCGATACACCTCCTTCCA |
| 2310 | GGAAGGAGGTGTATCGGGA | 5871 | TCCCGATACACCTCCTTCC |
| 2311 | GAAGGAGGTGTATCGGGAG | 5872 | CTCCCGATACACCTCCTTC |
| 2312 | AAGGAGGTGTATCGGGAGT | 5873 | ACTCCCGATACACCTCCTT |
| 2313 | AGGAGGTGTATCGGGAGTG | 5874 | CACTCCCGATACACCTCCT |
| 2314 | GGAGGTGTATCGGGAGTGG | 5875 | CCACTCCCGATACACCTCC |
| 2315 | GAGGTGTATCGGGAGTGGA | 5876 | TCCACTCCCGATACACCTC |
| 2316 | AGGTGTATCGGGAGTGGAG | 5877 | CTCCACTCCCGATACACCT |
| 2317 | GGTGTATCGGGAGTGGAGC | 5878 | GCTCCACTCCCGATACACC |
| 2318 | GTGTATCGGGAGTGGAGCT | 5879 | AGCTCCACTCCCGATACAC |
| 2319 | TGTATCGGGAGTGGAGCTC | 5880 | GAGCTCCACTCCCGATACA |
| 2320 | GTATCGGGAGTGGAGCTCA | 5881 | TGAGCTCCACTCCCGATAC |
| 2321 | TATCGGGAGTGGAGCTCAA | 5882 | TTGAGCTCCACTCCCGATA |
| 2322 | ATCGGGAGTGGAGCTCAAC | 5883 | GTTGAGCTCCACTCCCGAT |
| 2323 | TCGGGAGTGGAGCTCAACA | 5884 | TGTTGAGCTCCACTCCCGA |
| 2324 | CGGGAGTGGAGCTCAACAC | 5885 | GTGTTGAGCTCCACTCCCG |
| 2325 | GGGAGTGGAGCTCAACACA | 5886 | TGTGTTGAGCTCCACTCCC |
| 2326 | GGAGTGGAGCTCAACACAG | 5887 | CTGTGTTGAGCTCCACTCC |
| 2327 | GAGTGGAGCTCAACACAGG | 5888 | CCTGTGTTGAGCTCCACTC |
| 2328 | AGTGGAGCTCAACACAGGT | 5889 | ACCTGTGTTGAGCTCCACT |
| 2329 | GTGGAGCTCAACACAGGTA | 5890 | TACCTGTGTTGAGCTCCAC |
| 2330 | TGGAGCTCAACACAGGTAT | 5891 | ATACCTGTGTTGAGCTCCA |
| 2331 | GGAGCTCAACACAGGTATG | 5892 | CATACCTGTGTTGAGCTCC |
| 2332 | GAGCTCAACACAGGTATGG | 5893 | CCATACCTGTGTTGAGCTC |
| 2333 | AGCTCAACACAGGTATGGG | 5894 | CCCATACCTGTGTTGAGCT |
| 2334 | GCTCAACACAGGTATGGGG | 5895 | CCCCATACCTGTGTTGAGC |
| 2335 | CTCAACACAGGTATGGGGA | 5896 | TCCCCATACCTGTGTTGAG |
| 2336 | TCAACACAGGTATGGGGAC | 5897 | GTCCCCATACCTGTGTTGA |
| 2337 | CAACACAGGTATGGGGACA | 5898 | TGTCCCCATACCTGTGTTG |
| 2338 | AACACAGGTATGGGGACAG | 5899 | CTGTCCCCATACCTGTGTT |
| 2339 | ACACAGGTATGGGGACAGC | 5900 | GCTGTCCCCATACCTGTGT |
| 2340 | CACAGGTATGGGGACAGCC | 5901 | GGCTGTCCCCATACCTGTG |
| 2341 | ACAGGTATGGGGACAGCCG | 5902 | CGGCTGTCCCCATACCTGT |
| 2342 | CAGGTATGGGGACAGCCGT | 5903 | ACGGCTGTCCCCATACCTG |
| 2343 | AGGTATGGGGACAGCCGTT | 5904 | AACGGCTGTCCCCATACCT |
| 2344 | GGTATGGGGACAGCCGTTG | 5905 | CAACGGCTGTCCCCATACC |
| 2345 | GTATGGGGACAGCCGTTGG | 5906 | CCAACGGCTGTCCCCATAC |
| 2346 | TATGGGGACAGCCGTTGGC | 5907 | GCCAACGGCTGTCCCCATA |
| 2347 | ATGGGGACAGCCGTTGGCC | 5908 | GGCCAACGGCTGTCCCCAT |
| 2348 | TGGGGACAGCCGTTGGCCT | 5909 | AGGCCAACGGCTGTCCCCA |
| 2349 | GGGGACAGCCGTTGGCCTC | 5910 | GAGGCCAACGGCTGTCCCC |
| 2350 | GGGACAGCCGTTGGCCTCA | 5911 | TGAGGCCAACGGCTGTCCC |
| 2351 | GGACAGCCGTTGGCCTCAT | 5912 | ATGAGGCCAACGGCTGTCC |
| 2352 | GACAGCCGTTGGCCTCATG | 5913 | CATGAGGCCAACGGCTGTC |
| 2353 | ACAGCCGTTGGCCTCATGG | 5914 | CCATGAGGCCAACGGCTGT |
| 2354 | CAGCCGTTGGCCTCATGGC | 5915 | GCCATGAGGCCAACGGCTG |
| 2355 | AGCCGTTGGCCTCATGGCC | 5916 | GGCCATGAGGCCAACGGCT |
| 2356 | GCCGTTGGCCTCATGGCCG | 5917 | CGGCCATGAGGCCAACGGC |
| 2357 | CCGTTGGCCTCATGGCCGC | 5918 | GCGGCCATGAGGCCAACGG |
| 2358 | CGTTGGCCTCATGGCCGCA | 5919 | TGCGGCCATGAGGCCAACG |
| 2359 | GTTGGCCTCATGGCCGCAG | 5920 | CTGCGGCCATGAGGCCAAC |
| 2360 | TTGGCCTCATGGCCGCAGG | 5921 | CCTGCGGCCATGAGGCCAA |
| 2361 | TGGCCTCATGGCCGCAGGG | 5922 | CCCTGCGGCCATGAGGCCA |
| 2362 | GGCCTCATGGCCGCAGGGG | 5923 | CCCCTGCGGCCATGAGGCC |
| 2363 | GCCTCATGGCCGCAGGGGC | 5924 | GCCCCTGCGGCCATGAGGC |
| 2364 | CCTCATGGCCGCAGGGGCC | 5925 | GGCCCCTGCGGCCATGAGG |
| 2365 | CTCATGGCCGCAGGGGCCG | 5926 | CGGCCCCTGCGGCCATGAG |
| 2366 | TCATGGCCGCAGGGGCCGC | 5927 | GCGGCCCCTGCGGCCATGA |
| 2367 | CATGGCCGCAGGGGCCGCA | 5928 | TGCGGCCCCTGCGGCCATG |
| 2368 | ATGGCCGCAGGGGCCGCAG | 5929 | CTGCGGCCCCTGCGGCCAT |
| 2369 | TGGCCGCAGGGGCCGCAGG | 5930 | CCTGCGGCCCCTGCGGCCA |
| 2370 | GGCCGCAGGGGCCGCAGGA | 5931 | TCCTGCGGCCCCTGCGGCC |
| 2371 | GGCGCAGGGGCCGCAGGAG | 5932 | CTCCTGCGGCCCCTGCGGC |
| 2372 | CCGCAGGGGCCGCAGGAGC | 5933 | GCTCCTGCGGCCCCTGCGG |
| 2373 | CGCAGGGGCCGCAGGAGCC | 5934 | GGCTCCTGCGGCCCCTGCG |
| 2374 | GCAGGGGCCGCAGGAGCCT | 5935 | AGGCTCCTGCGGCCCCTGC |
| 2375 | CAGGGGCCGCAGGAGCCTC | 5936 | GAGGCTCCTGCGGCCCCTG |
| 2376 | AGGGGCCGCAGGAGCCTCA | 5937 | TGAGGCTCCTGCGGCCCCT |
| 2377 | GGGGCCGCAGGAGCCTCAG | 5938 | CTGAGGCTCCTGCGGCCCC |
| 2378 | GGGCCGCAGGAGCCTCAGG | 5939 | CCTGAGGCTCCTGCGGCCC |
| 2379 | GGCCGCAGGAGCCTCAGGG | 5940 | CCCTGAGGCTCCTGCGGCC |
| 2380 | GCCGCAGGAGCCTCAGGGG | 5941 | CCCCTGAGGCTCCTGCGGC |
| 2381 | CCGCAGGAGCCTCAGGGGC | 5942 | GCCCCTGAGGCTCCTGCGG |
| 2382 | CGCAGGAGCCTCAGGGGCC | 5943 | GGCCCCTGAGGCTCCTGCG |
| 2383 | GCAGGAGCCTCAGGGGCCG | 5944 | CGGCCCCTGAGGCTCCTGC |
| 2384 | CAGGAGCCTCAGGGGCCGC | 5945 | GCGGCCCCTGAGGCTCCTG |
| 2385 | AGGAGCCTCAGGGGCCGCA | 5946 | TGCGGCCCCTGAGGCTCCT |
| 2386 | GGAGCCTCAGGGGCCGCAA | 5947 | TTGCGGCCCCTGAGGCTCC |
| 2387 | GAGCCTCAGGGGCCGCAAG | 5948 | CTTGCGGCCCCTGAGGCTC |
| 2388 | AGCCTCAGGGGCCGCAAGG | 5949 | CCTTGCGGCCCCTGAGGCT |
| 2389 | GCCTCAGGGGCCGCAAGGA | 5950 | TCCTTGCGGCCCCTGAGGC |
| 2390 | CCTCAGGGGCCGCAAGGAA | 5951 | TTCCTTGCGGCCCCTGAGG |
| 2391 | CTCAGGGGCCGCAAGGAAG | 5952 | CTTCCTTGCGGCCCCTGAG |
| 2392 | TCAGGGGCCGCAAGGAAGA | 5953 | TCTTCCTTGCGGCCCCTGA |
| 2393 | CAGGGGCCGCAAGGAAGAG | 5954 | CTCTTCCTTGCGGCCCCTG |
| 2394 | AGGGGCCGCAAGGAAGAGG | 5955 | CCTCTTCCTTGCGGCCCCT |
| 2395 | GGGGCCGCAAGGAAGAGGA | 5956 | TCCTCTTCCTTGCGGCCCC |
| 2396 | GGGCCGCAAGGAAGAGGAG | 5957 | CTCCTCTTCCTTGCGGCCC |
| 2397 | GGCCGCAAGGAAGAGGAGC | 5958 | GCTCCTCTTCCTTGCGGCC |
| 2398 | GCCGCAAGGAAGAGGAGCT | 5959 | AGCTCCTCTTCCTTGCGGC |
| 2399 | CCGCAAGGAAGAGGAGCTC | 5960 | GAGCTCCTCTTCCTTGCGG |
| 2400 | CGCAAGGAAGAGGAGCTCT | 5961 | AGAGCTCCTCTTCCTTGCG |
| 2401 | GCAAGGAAGAGGAGCTCTA | 5962 | TAGAGCTCCTCTTCCTTGC |
| 2402 | CAAGGAAGAGGAGCTCTAC | 5963 | GTAGAGCTCCTCTTCCTTG |
| 2403 | AAGGAAGAGGAGCTCTACC | 5964 | GGTAGAGCTCCTCTTCCTT |
| 2404 | AGGAAGAGGAGCTCTACCA | 5965 | TGGTAGAGCTCCTCTTCCT |
| 2405 | GGAAGAGGAGCTCTACCAT | 5966 | ATGGTAGAGCTCCTCTTCC |
| 2406 | GAAGAGGAGCTCTACCATG | 5967 | CATGGTAGAGCTCCTCTTC |
| 2407 | AAGAGGAGCTCTACCATGG | 5968 | CCATGGTAGAGCTCCTCTT |
| 2408 | AGAGGAGCTCTACCATGGG | 5969 | CCCATGGTAGAGCTCCTCT |
| 2409 | GAGGAGCTCTACCATGGGA | 5970 | TCCCATGGTAGAGCTCCTC |
| 2410 | AGGAGCTCTACCATGGGAA | 5971 | TTCCCATGGTAGAGCTCCT |
| 2411 | GGAGCTCTACCATGGGAAC | 5972 | GTTCCCATGGTAGAGCTCC |
| 2412 | GAGCTCTACCATGGGAACC | 5973 | GGTTCCCATGGTAGAGCTC |
| 2413 | AGCTCTACCATGGGAACCC | 5974 | GGGTTCCCATGGTAGAGCT |
| 2414 | GCTCTACCATGGGAACCCT | 5975 | AGGGTTCCCATGGTAGAGC |
| 2415 | CTCTACCATGGGAACCCTG | 5976 | CAGGGTTCCCATGGTAGAG |
| 2416 | TCTACCATGGGAACCCTGC | 5977 | GCAGGGTTCCCATGGTAGA |
| 2417 | CTACCATGGGAACCCTGCG | 5978 | CGCAGGGTTCCCATGGTAG |
| 2418 | TACCATGGGAACCCTGCGG | 5979 | CCGCAGGGTTCCCATGGTA |
| 2419 | ACCATGGGAACCCTGCGGG | 5980 | CCCGCAGGGTTCCCATGGT |
| 2420 | CCATGGGAACCCTGCGGGA | 5981 | TCCCGCAGGGTTCCCATGG |
| 2421 | CATGGGAACCCTGCGGGAC | 5982 | GTCCCGCAGGGTTCCCATG |
| 2422 | ATGGGAACCCTGCGGGACT | 5983 | AGTCCCGCAGGGTTCCCAT |
| 2423 | TGGGAACCCTGCGGGACTA | 5984 | TAGTCCCGCAGGGTTCCCA |
| 2424 | GGGAACCCTGCGGGACTAC | 5985 | GTAGTCCCGCAGGGTTCCC |
| 2425 | GGAACCCTGCGGGACTACG | 5986 | CGTAGTCCCGCAGGGTTCC |
| 2426 | GAACCCTGCGGGACTACGC | 5987 | GCGTAGTCCCGCAGGGTTC |
| 2427 | AACCCTGCGGGACTACGCT | 5988 | AGCGTAGTCCCGCAGGGTT |
| 2428 | ACCCTGCGGGACTACGCTG | 5989 | CAGCGTAGTCCCGCAGGGT |
| 2429 | CCCTGCGGGACTACGCTGA | 5990 | TCAGCGTAGTCCCGCAGGG |
| 2430 | CCTGCGGGACTACGCTGAC | 5991 | GTCAGCGTAGTCCCGCAGG |
| 2431 | CTGCGGGACTACGCTGACG | 5992 | CGTCAGCGTAGTCCCGCAG |
| 2432 | TGCGGGACTACGCTGACGC | 5993 | GCGTCAGCGTAGTCCCGCA |
| 2433 | GCGGGACTACGCTGACGCA | 5994 | TGCGTCAGCGTAGTCCCGC |
| 2434 | CGGGACTACGCTGACGCAG | 5995 | CTGCGTCAGCGTAGTCCCG |
| 2435 | GGGACTACGCTGACGCAGA | 5996 | TCTGCGTCAGCGTAGTCCC |
| 2436 | GGACTACGCTGACGCAGAC | 5997 | GTCTGCGTCAGCGTAGTCC |
| 2437 | GACTACGCTGACGCAGACA | 5998 | TGTCTGCGTCAGCGTAGTC |
| 2438 | ACTACGCTGACGCAGACAT | 5999 | ATGTCTGCGTCAGCGTAGT |
| 2439 | CTACGCTGACGCAGACATC | 6000 | GATGTCTGCGTCAGCGTAG |
| 2440 | TACGCTGACGCAGACATCA | 6001 | TGATGTCTGCGTCAGCGTA |
| 2441 | ACGCTGACGCAGACATCAA | 6002 | TTGATGTCTGCGTCAGCGT |
| 2442 | CGCTGACGCAGACATCAAC | 6003 | GTTGATGTCTGCGTCAGCG |
| 2443 | GCTGACGCAGACATCAACA | 6004 | TGTTGATGTCTGCGTCAGC |
| 2444 | CTGACGCAGACATCAACAT | 6005 | ATGTTGATGTCTGCGTCAG |
| 2445 | TGACGCAGACATCAACATG | 6006 | CATGTTGATGTCTGCGTCA |
| 2446 | GACGCAGACATCAACATGG | 6007 | CCATGTTGATGTCTGCGTC |
| 2447 | ACGCAGACATCAACATGGC | 6008 | GCCATGTTGATGTCTGCGT |
| 2448 | CGCAGACATCAACATGGCT | 6009 | AGCCATGTTGATGTCTGCG |
| 2449 | GCAGACATCAACATGGCTT | 6010 | AAGCCATGTTGATGTCTGC |
| 2450 | CAGACATCAACATGGCTTT | 6011 | AAAGCCATGTTGATGTCTG |
| 2451 | AGACATCAACATGGCTTTC | 6012 | GAAAGCCATGTTGATGTCT |
| 2452 | GACATCAACATGGCTTTCT | 6013 | AGAAAGCCATGTTGATGTC |
| 2453 | ACATCAACATGGCTTTCTT | 6014 | AAGAAAGCCATGTTGATGT |
| 2454 | CATCAACATGGCTTTCTTG | 6015 | CAAGAAAGCCATGTTGATG |
| 2455 | ATCAACATGGCTTTCTTGG | 6016 | CCAAGAAAGCCATGTTGAT |
| 2456 | TCAACATGGCTTTCTTGGA | 6017 | TCCAAGAAAGCCATGTTGA |
| 2457 | CAACATGGCTTTCTTGGAC | 6018 | GTCCAAGAAAGCCATGTTG |
| 2458 | AACATGGCTTTCTTGGACA | 6019 | TGTCCAAGAAAGCCATGTT |
| 2459 | ACATGGCTTTCTTGGACAG | 6020 | CTGTCCAAGAAAGCCATGT |
| 2460 | CATGGCTTTCTTGGACAGC | 6021 | GCTGTCCAAGAAAGCCATG |
| 2461 | ATGGCTTTCTTGGACAGCT | 6022 | AGCTGTCCAAGAAAGCCAT |
| 2462 | TGGCTTTCTTGGACAGCTA | 6023 | TAGCTGTCCAAGAAAGCCA |
| 2463 | GGCTTTCTTGGACAGCTAC | 6024 | GTAGCTGTCCAAGAAAGCC |
| 2464 | GCTTTCTTGGACAGCTACT | 6025 | AGTAGCTGTCCAAGAAAGC |
| 2465 | CTTTCTTGGACAGCTACTT | 6026 | AAGTAGCTGTCCAAGAAAG |
| 2466 | TTTCTTGGACAGCTACTTC | 6027 | GAAGTAGCTGTCCAAGAAA |
| 2467 | TTCTTGGACAGCTACTTCT | 6028 | AGAAGTAGCTGTCCAAGAA |
| 2468 | TCTTGGACAGCTACTTCTC | 6029 | GAGAAGTAGCTGTCCAAGA |
| 2469 | CTTGGACAGCTACTTCTCG | 6030 | CGAGAAGTAGCTGTCCAAG |
| 2470 | TTGGACAGCTACTTCTCGG | 6031 | CCGAGAAGTAGCTGTCCAA |
| 2471 | TGGACAGCTACTTCTCGGA | 6032 | TCCGAGAAGTAGCTGTCCA |
| 2472 | GGACAGCTACTTCTCGGAG | 6033 | CTCCGAGAAGTAGCTGTCC |
| 2473 | GACAGCTACTTCTCGGAGA | 6034 | TCTCCGAGAAGTAGCTGTC |
| 2474 | ACAGCTACTTCTCGGAGAA | 6035 | TTCTCCGAGAAGTAGCTGT |
| 2475 | CAGCTACTTCTCGGAGAAA | 6036 | TTTCTCCGAGAAGTAGCTG |
| 2476 | AGCTACTTCTCGGAGAAAG | 6037 | CTTTCTCCGAGAAGTAGCT |
| 2477 | GCTACTTCTCGGAGAAAGC | 6038 | GCTTTCTCCGAGAAGTAGC |
| 2478 | CTACTTCTCGGAGAAAGCG | 6039 | CGCTTTCTCCGAGAAGTAG |
| 2479 | TACTTCTCGGAGAAAGCGT | 6040 | ACGCTTTCTCCGAGAAGTA |
| 2480 | ACTTCTCGGAGAAAGCGTA | 6041 | TACGCTTTCTCCGAGAAGT |
| 2481 | CTTCTCGGAGAAAGCGTAT | 6042 | ATACGCTTTCTCCGAGAAG |
| 2482 | TTCTCGGAGAAAGCGTATG | 6043 | CATACGCTTTCTCCGAGAA |
| 2483 | TCTCGGAGAAAGCGTATGC | 6044 | GCATACGCTTTCTCCGAGA |
| 2484 | CTCGGAGAAAGCGTATGCT | 6045 | AGCATACGCTTTCTCCGAG |
| 2485 | TCGGAGAAAGCGTATGCTT | 6046 | AAGCATACGCTTTCTCCGA |
| 2486 | CGGAGAAAGCGTATGCTTA | 6047 | TAAGCATACGCTTTCTCCG |
| 2487 | GGAGAAAGCGTATGCTTAT | 6048 | ATAAGCATACGCTTTCTCC |
| 2488 | GAGAAAGCGTATGCTTATG | 6049 | CATAAGCATACGCTTTCTC |
| 2489 | AGAAAGCGTATGCTTATGC | 6050 | GCATAAGCATACGCTTTCT |
| 2490 | GAAAGCGTATGCTTATGCA | 6051 | TGCATAAGCATACGCTTTC |
| 2491 | AAAGCGTATGCTTATGCAG | 6052 | CTGCATAAGCATACGCTTT |
| 2492 | AAGCGTATGCTTATGCAGA | 6053 | TCTGCATAAGCATACGCTT |
| 2493 | AGCGTATGCTTATGCAGAT | 6054 | ATCTGCATAAGCATACGCT |
| 2494 | GCGTATGCTTATGCAGATG | 6055 | CATCTGCATAAGCATACGC |
| 2495 | CGTATGCTTATGCAGATGA | 6056 | TCATCTGCATAAGCATACG |
| 2496 | GTATGCTTATGCAGATGAA | 6057 | TTCATCTGCATAAGCATAC |
| 2497 | TATGCTTATGCAGATGAAG | 6058 | CTTCATCTGCATAAGCATA |
| 2498 | ATGCTTATGCAGATGAAGA | 6059 | TCTTCATCTGCATAAGCAT |
| 2499 | TGCTTATGCAGATGAAGAT | 6060 | ATCTTCATCTGCATAAGCA |
| 2500 | GCTTATGCAGATGAAGATG | 6061 | CATCTTCATCTGCATAAGC |
| 2501 | CTTATGCAGATGAAGATGA | 6062 | TCATCTTCATCTGCATAAG |
| 2502 | TTATGCAGATGAAGATGAA | 6063 | TTCATCTTCATCTGCATAA |
| 2503 | TATGCAGATGAAGATGAAG | 6064 | CTTCATCTTCATCTGCATA |
| 2504 | ATGCAGATGAAGATGAAGG | 6065 | CCTTCATCTTCATCTGCAT |
| 2505 | TGCAGATGAAGATGAAGGT | 6066 | ACCTTCATCTTCATCTGCA |
| 2506 | GCAGATGAAGATGAAGGTC | 6067 | GACCTTCATCTTCATCTGC |
| 2507 | CAGATGAAGATGAAGGTCG | 6068 | CGACCTTCATCTTCATCTG |
| 2508 | AGATGAAGATGAAGGTCGA | 6069 | TCGACCTTCATCTTCATCT |
| 2509 | GATGAAGATGAAGGTCGAC | 6070 | GTCGACCTTCATCTTCATC |
| 2510 | ATGAAGATGAAGGTCGACC | 6071 | GGTCGACCTTCATCTTCAT |
| 2511 | TGAAGATGAAGGTCGACCA | 6072 | TGGTCGACCTTCATCTTCA |
| 2512 | GAAGATGAAGGTCGACCAG | 6073 | CTGGTCGACCTTCATCTTC |
| 2513 | AAGATGAAGGTCGACCAGC | 6074 | GCTGGTCGACCTTCATCTT |
| 2514 | AGATGAAGGTCGACCAGCC | 6075 | GGCTGGTCGACCTTCATCT |
| 2515 | GATGAAGGTCGACCAGCCA | 6076 | TGGCTGGTCGACCTTCATC |
| 2516 | ATGAAGGTCGACCAGCCAA | 6077 | TTGGCTGGTCGACCTTCAT |
| 2517 | TGAAGGTCGACCAGCCAAT | 6078 | ATTGGCTGGTCGACCTTCA |
| 2518 | GAAGGTCGACCAGCCAATG | 6079 | CATTGGCTGGTCGACCTTC |
| 2519 | AAGGTCGACCAGCCAATGA | 6080 | TCATTGGCTGGTCGACCTT |
| 2520 | AGGTCGACCAGCCAATGAC | 6081 | GTCATTGGCTGGTCGACCT |
| 2521 | GGTCGACCAGCCAATGACT | 6082 | AGTCATTGGCTGGTCGACC |
| 2522 | GTCGACCAGCCAATGACTG | 6083 | CAGTCATTGGCTGGTCGAC |
| 2523 | TCGACCAGCCAATGACTGC | 6084 | GCAGTCATTGGCTGGTCGA |
| 2524 | CGACCAGCCAATGACTGCT | 6085 | AGCAGTCATTGGCTGGTCG |
| 2525 | GACCAGCCAATGACTGCTT | 6086 | AAGCAGTCATTGGCTGGTC |
| 2526 | ACCAGCCAATGACTGCTTG | 6087 | CAAGCAGTCATTGGCTGGT |
| 2527 | CCAGCCAATGACTGCTTGC | 6088 | GCAAGCAGTCATTGGCTGG |
| 2528 | CAGCCAATGACTGCTTGCT | 6089 | AGCAAGCAGTCATTGGCTG |
| 2529 | AGCCAATGACTGCTTGCTC | 6090 | GAGCAAGCAGTCATTGGCT |
| 2530 | GCCAATGACTGCTTGCTCA | 6091 | TGAGCAAGCAGTCATTGGC |
| 2531 | CCAATGACTGCTTGCTCAT | 6092 | ATGAGCAAGCAGTCATTGG |
| 2532 | CAATGACTGCTTGCTCATT | 6093 | AATGAGCAAGCAGTCATTG |
| 2533 | AATGACTGCTTGCTCATTT | 6094 | AAATGAGCAAGCAGTCATT |
| 2534 | ATGACTGCTTGCTCATTTA | 6095 | TAAATGAGCAAGCAGTCAT |
| 2535 | TGACTGCTTGCTCATTTAT | 6096 | ATAAATGAGCAAGCAGTCA |
| 2536 | GACTGCTTGCTCATTTATG | 6097 | CATAAATGAGCAAGCAGTC |
| 2537 | ACTGCTTGCTCATTTATGA | 6098 | TCATAAATGAGCAAGCAGT |
| 2538 | CTGCTTGCTCATTTATGAC | 6099 | GTCATAAATGAGCAAGCAG |
| 2539 | TGCTTGCTCATTTATGACC | 6100 | GGTCATAAATGAGCAAGCA |
| 2540 | GCTTGCTCATTTATGACCA | 6101 | TGGTCATAAATGAGCAAGC |
| 2541 | CTTGCTCATTTATGACCAC | 6102 | GTGGTCATAAATGAGCAAG |
| 2542 | TTGCTCATTTATGACCACG | 6103 | CGTGGTCATAAATGAGCAA |
| 2543 | TGCTCATTTATGACCACGA | 6104 | TCGTGGTCATAAATGAGCA |
| 2544 | GCTCATTTATGACCACGAG | 6105 | CTCGTGGTCATAAATGAGC |
| 2545 | CTCATTTATGACCACGAGG | 6106 | CCTCGTGGTCATAAATGAG |
| 2546 | TCATTTATGACCACGAGGG | 6107 | CCCTCGTGGTCATAAATGA |
| 2547 | CATTTATGACCACGAGGGA | 6108 | TCCCTCGTGGTCATAAATG |
| 2548 | ATTTATGACCACGAGGGAG | 6109 | CTCCCTCGTGGTCATAAAT |
| 2549 | TTTATGACCACGAGGGAGT | 6110 | ACTCCCTCGTGGTCATAAA |
| 2550 | TTATGACCACGAGGGAGTC | 6111 | GACTCCCTCGTGGTCATAA |
| 2551 | TATGACCACGAGGGAGTCG | 6112 | CGACTCCCTCGTGGTCATA |
| 2552 | ATGACCACGAGGGAGTCGG | 6113 | CCGACTCCCTCGTGGTCAT |
| 2553 | TGACCACGAGGGAGTCGGG | 6114 | CCCGACTCCCTCGTGGTCA |
| 2554 | GACCACGAGGGAGTCGGGT | 6115 | ACCCGACTCCCTCGTGGTC |
| 2555 | ACCACGAGGGAGTCGGGTC | 6116 | GACCCGACTCCCTCGTGGT |
| 2556 | CCACGAGGGAGTCGGGTCT | 6117 | AGACCCGACTCCCTCGTGG |
| 2557 | CACGAGGGAGTCGGGTCTC | 6118 | GAGACCCGACTCCCTCGTG |
| 2558 | ACGAGGGAGTCGGGTCTCC | 6119 | GGAGACCCGACTCCCTCGT |
| 2559 | CGAGGGAGTCGGGTCTCCC | 6120 | GGGAGACCCGACTCCCTCG |
| 2560 | GAGGGAGTCGGGTCTCCCG | 6121 | CGGGAGACCCGACTCCCTC |
| 2561 | AGGGAGTCGGGTCTCCCGT | 6122 | ACGGGAGACCCGACTCCCT |
| 2562 | GGGAGTCGGGTCTCCCGTA | 6123 | TACGGGAGACCCGACTCCC |
| 2563 | GGAGTCGGGTCTCCCGTAG | 6124 | CTACGGGAGACCCGACTCC |
| 2564 | GAGTCGGGTCTCCCGTAGG | 6125 | CCTACGGGAGACCCGACTC |
| 2565 | AGTCGGGTCTCCCGTAGGC | 6126 | GCCTACGGGAGACCCGACT |
| 2566 | GTCGGGTCTCCCGTAGGCT | 6127 | AGCCTACGGGAGACCCGAC |
| 2567 | TCGGGTCTCCCGTAGGCTC | 6128 | GAGCCTACGGGAGACCCGA |
| 2568 | CGGGTCTCCCGTAGGCTCT | 6129 | AGAGCCTACGGGAGACCCG |
| 2569 | GGGTCTCCCGTAGGCTCTA | 6130 | TAGAGCCTACGGGAGACCC |
| 2570 | GGTCTCCCGTAGGCTCTAT | 6131 | ATAGAGCCTACGGGAGACC |
| 2571 | GTCTCCCGTAGGCTCTATT | 6132 | AATAGAGCCTACGGGAGAC |
| 2572 | TCTCCCGTAGGCTCTATTG | 6133 | CAATAGAGCCTACGGGAGA |
| 2573 | CTCCCGTAGGCTCTATTGG | 6134 | CCAATAGAGCCTACGGGAG |
| 2574 | TCCCGTAGGCTCTATTGGT | 6135 | ACCAATAGAGCCTACGGGA |
| 2575 | CCCGTAGGCTCTATTGGTT | 6136 | AACCAATAGAGCCTACGGG |
| 2576 | CCGTAGGCTCTATTGGTTG | 6137 | CAACCAATAGAGCCTACGG |
| 2577 | CGTAGGCTCTATTGGTTGT | 6138 | ACAACCAATAGAGCCTACG |
| 2578 | GTAGGCTCTATTGGTTGTT | 6139 | AACAACCAATAGAGCCTAC |
| 2579 | TAGGCTCTATTGGTTGTTG | 6140 | CAACAACCAATAGAGCCTA |
| 2580 | AGGCTCTATTGGTTGTTGC | 6141 | GCAACAACCAATAGAGCCT |
| 2581 | GGCTCTATTGGTTGTTGCA | 6142 | TGCAACAACCAATAGAGCC |
| 2582 | GCTCTATTGGTTGTTGCAG | 6143 | CTGCAACAACCAATAGAGC |
| 2583 | CTCTATTGGTTGTTGCAGT | 6144 | ACTGCAACAACCAATAGAG |
| 2584 | TCTATTGGTTGTTGCAGTT | 6145 | AACTGCAACAACCAATAGA |
| 2585 | CTATTGGTTGTTGCAGTTG | 6146 | CAACTGCAACAACCAATAG |
| 2586 | TATTGGTTGTTGCAGTTGG | 6147 | CCAACTGCAACAACCAATA |
| 2587 | ATTGGTTGTTGCAGTTGGA | 6148 | TCCAACTGCAACAACCAAT |
| 2588 | TTGGTTGTTGCAGTTGGAT | 6149 | ATCCAACTGCAACAACCAA |
| 2589 | TGGTTGTTGCAGTTGGATT | 6150 | AATCCAACTGCAACAACCA |
| 2590 | GGTTGTTGCAGTTGGATTG | 6151 | CAATCCAACTGCAACAACC |
| 2591 | GTTGTTGCAGTTGGATTGT | 6152 | ACAATCCAACTGCAACAAC |
| 2592 | TTGTTGCAGTTGGATTGTG | 6153 | CACAATCCAACTGCAACAA |
| 2593 | TGTTGCAGTTGGATTGTGG | 6154 | CCACAATCCAACTGCAACA |
| 2594 | GTTGCAGTTGGATTGTGGA | 6155 | TCCACAATCCAACTGCAAC |
| 2595 | TTGCAGTTGGATTGTGGAT | 6156 | ATCCACAATCCAACTGCAA |
| 2596 | TGCAGTTGGATTGTGGATG | 6157 | CATCCACAATCCAACTGCA |
| 2597 | GCAGTTGGATTGTGGATGA | 6158 | TCATCCACAATCCAACTGC |
| 2598 | CAGTTGGATTGTGGATGAC | 6159 | GTCATCCACAATCCAACTG |
| 2599 | AGTTGGATTGTGGATGACT | 6160 | AGTCATCCACAATCCAACT |
| 2600 | GTTGGATTGTGGATGACTT | 6161 | AAGTCATCCACAATCCAAC |
| 2601 | TTGGATTGTGGATGACTTA | 6162 | TAAGTCATCCACAATCCAA |
| 2602 | TGGATTGTGGATGACTTAG | 6163 | CTAAGTCATCCACAATCCA |
| 2603 | GGATTGTGGATGACTTAGA | 6164 | TCTAAGTCATCCACAATCC |
| 2604 | GATTGTGGATGACTTAGAT | 6165 | ATCTAAGTCATCCACAATC |
| 2605 | ATTGTGGATGACTTAGATG | 6166 | CATCTAAGTCATCCACAAT |
| 2606 | TTGTGGATGACTTAGATGA | 6167 | TCATCTAAGTCATCCACAA |
| 2607 | TGTGGATGACTTAGATGAA | 6168 | TTCATCTAAGTCATCCACA |
| 2608 | GTGGATGACTTAGATGAAA | 6169 | TTTCATCTAAGTCATCCAC |
| 2609 | TGGATGACTTAGATGAAAG | 6170 | CTTTCATCTAAGTCATCCA |
| 2610 | GGATGACTTAGATGAAAGC | 6171 | GCTTTCATCTAAGTCATCC |
| 2611 | GATGACTTAGATGAAAGCT | 6172 | AGCTTTCATCTAAGTCATC |
| 2612 | ATGACTTAGATGAAAGCTG | 6173 | CAGCTTTCATCTAAGTCAT |
| 2613 | TGACTTAGATGAAAGCTGC | 6174 | GCAGCTTTCATCTAAGTCA |
| 2614 | GACTTAGATGAAAGCTGCA | 6175 | TGCAGCTTTCATCTAAGTC |
| 2615 | ACTTAGATGAAAGCTGCAT | 6176 | ATGCAGCTTTCATCTAAGT |
| 2616 | CTTAGATGAAAGCTGCATG | 6177 | CATGCAGCTTTCATCTAAG |
| 2617 | TTAGATGAAAGCTGCATGG | 6178 | CCATGCAGCTTTCATCTAA |
| 2618 | TAGATGAAAGCTGCATGGA | 6179 | TCCATGCAGCTTTCATCTA |
| 2619 | AGATGAAAGCTGCATGGAA | 6180 | TTCCATGCAGCTTTCATCT |
| 2620 | GATGAAAGCTGCATGGAAA | 6181 | TTTCCATGCAGCTTTCATC |
| 2621 | ATGAAAGCTGCATGGAAAC | 6182 | GTTTCCATGCAGCTTTCAT |
| 2622 | TGAAAGCTGCATGGAAACT | 6183 | AGTTTCCATGCAGCTTTCA |
| 2623 | GAAAGCTGCATGGAAACTT | 6184 | AAGTTTCCATGCAGCTTTC |
| 2624 | AAAGCTGCATGGAAACTTT | 6185 | AAAGTTTCCATGCAGCTTT |
| 2625 | AAGCTGCATGGAAACTTTA | 6186 | TAAAGTTTCCATGCAGCTT |
| 2626 | AGCTGCATGGAAACTTTAG | 6187 | CTAAAGTTTCCATGCAGCT |
| 2627 | GCTGCATGGAAACTTTAGA | 6188 | TGTAAAGTTTCCATGCAGC |
| 2628 | CTGCATGGAAACTTTAGAT | 6189 | ATCTAAAGTTTCCATGCAG |
| 2629 | TGCATGGAAACTTTAGATC | 6190 | GATCTAAAGTTTCCATGCA |
| 2630 | GCATGGAAACTTTAGATCC | 6191 | GGATCTAAAGTTTCCATGC |
| 2631 | CATGGAAACTTTAGATCCA | 6192 | TGGATCTAAAGTTTCCATG |
| 2632 | ATGGAAACTTTAGATCCAA | 6193 | TTGGATCTAAAGTTTCCAT |
| 2633 | TGGAAACTTTAGATCCAAA | 6194 | TTTGGATCTAAAGTTTCCA |
| 2634 | GGAAACTTTAGATCCAAAA | 6195 | TTTTGGATCTAAAGTTTCC |
| 2635 | GAAACTTTAGATCCAAAAT | 6196 | ATTTTGGATCTAAAGTTTC |
| 2636 | AAACTTTAGATCCAAAATT | 6197 | AATTTTGGATCTAAAGTTT |
| 2637 | AACTTTAGATCCAAAATTT | 6198 | AAATTTTGGATCTAAAGTT |
| 2638 | ACTTTAGATCCAAAATTTA | 6199 | TAAATTTTGGATCTAAAGT |
| 2639 | CTTTAGATCCAAAATTTAG | 6200 | CTAAATTTTGGATCTAAAG |
| 2640 | TTTAGATCCAAAATTTAGG | 6201 | CCTAAATTTTGGATCTAAA |
| 2641 | TTAGATCCAAAATTTAGGA | 6202 | TCCTAAATTTTGGATCTAA |
| 2642 | TAGATCCAAAATTTAGGAC | 6203 | GTCCTAAATTTTGGATCTA |
| 2643 | AGATCCAAAATTTAGGACT | 6204 | AGTCCTAAATTTTGGATCT |
| 2644 | GATCCAAAATTTAGGACTC | 6205 | GAGTCCTAAATTTTGGATC |
| 2645 | ATCCAAAATTTAGGACTCT | 6206 | AGAGTCCTAAATTTTGGAT |
| 2646 | TCCAAAATTTAGGACTCTT | 6207 | AAGAGTCCTAAATTTTGGA |
| 2647 | CCAAAATTTAGGACTCTTG | 6208 | CAAGAGTCCTAAATTTTGG |
| 2648 | CAAAATTTAGGACTCTTGC | 6209 | GCAAGAGTCCTAAATTTTG |
| 2649 | AAAATTTAGGACTCTTGCT | 6210 | AGCAAGAGTCCTAAATTTT |
| 2650 | AAATTTAGGACTCTTGCTG | 6211 | CAGCAAGAGTCCTAAATTT |
| 2651 | AATTTAGGACTCTTGCTGA | 6212 | TCAGCAAGAGTCCTAAATT |
| 2652 | ATTTAGGACTCTTGCTGAG | 6213 | CTCAGCAAGAGTCCTAAAT |
| 2653 | TTTAGGACTCTTGCTGAGA | 6214 | TCTCAGCAAGAGTCCTAAA |
| 2654 | TTAGGACTCTTGCTGAGAT | 6215 | ATCTCAGCAAGAGTCCTAA |
| 2655 | TAGGACTCTTGCTGAGATC | 6216 | GATCTCAGCAAGAGTCCTA |
| 2656 | AGGACTCTTGCTGAGATCT | 6217 | AGATCTCAGCAAGAGTCCT |
| 2657 | GGACTCTTGCTGAGATCTG | 6218 | CAGATCTCAGCAAGAGTCC |
| 2658 | GACTCTTGCTGAGATCTGC | 6219 | GCAGATCTCAGCAAGAGTC |
| 2659 | ACTCTTGCTGAGATCTGCT | 6220 | AGCAGATCTCAGCAAGAGT |
| 2660 | CTCTTGCTGAGATCTGCTT | 6221 | AAGCAGATCTCAGCAAGAG |
| 2661 | TCTTGCTGAGATCTGCTTA | 6222 | TAAGCAGATCTCAGCAAGA |
| 2662 | CTTGCTGAGATCTGCTTAA | 6223 | TTAAGCAGATCTCAGCAAG |
| 2663 | TTGCTGAGATCTGCTTAAA | 6224 | TTTAAGCAGATCTCAGCAA |
| 2664 | TGCTGAGATCTGCTTAAAC | 6225 | GTTTAAGCAGATCTCAGCA |
| 2665 | GCTGAGATCTGCTTAAACA | 6226 | TGTTTAAGCAGATCTCAGC |
| 2666 | CTGAGATCTGCTTAAACAC | 6227 | GTGTTTAAGCAGATCTCAG |
| 2667 | TGAGATCTGCTTAAACACA | 6228 | TGTGTTTAAGCAGATCTCA |
| 2668 | GAGATCTGCTTAAACACAG | 6229 | CTGTGTTTAAGCAGATCTC |
| 2669 | AGATCTGCTTAAACACAGA | 6230 | TCTGTGTTTAAGCAGATCT |
| 2670 | GATCTGCTTAAACACAGAA | 6231 | TTCTGTGTTTAAGCAGATC |
| 2671 | ATCTGCTTAAACACAGAAA | 6232 | TTTCTGTGTTTAAGCAGAT |
| 2672 | TCTGCTTAAACACAGAAAT | 6233 | ATTTCTGTGTTTAAGCAGA |
| 2673 | CTGCTTAAACACAGAAATT | 6234 | AATTTCTGTGTTTAAGCAG |
| 2674 | TGCTTAAACACAGAAATTG | 6235 | CAATTTCTGTGTTTAAGCA |
| 2675 | GCTTAAACACAGAAATTGA | 6236 | TCAATTTCTGTGTTTAAGC |
| 2676 | CTTAAACACAGAAATTGAA | 6237 | TTCAATTTCTGTGTTTAAG |
| 2677 | TTAAACACAGAAATTGAAC | 6238 | GTTCAATTTCTGTGTTTAA |
| 2678 | TAAACACAGAAATTGAACC | 6239 | GGTTCAATTTCTGTGTTTA |
| 2679 | AAACACAGAAATTGAACCA | 6240 | TGGTTCAATTTCTGTGTTT |
| 2680 | AACACAGAAATTGAACCAT | 6241 | ATGGTTCAATTTCTGTGTT |
| 2681 | ACACAGAAATTGAACCATT | 6242 | AATGGTTCAATTTCTGTGT |
| 2682 | CACAGAAATTGAACCATTT | 6243 | AAATGGTTCAATTTCTGTG |
| 2683 | ACAGAAATTGAACCATTTC | 6244 | GAAATGGTTCAATTTCTGT |
| 2684 | CAGAAATTGAACCATTTCC | 6245 | GGAAATGGTTCAATTTCTG |
| 2685 | AGAAATTGAACCATTTCCT | 6246 | AGGAAATGGTTCAATTTCT |
| 2686 | GAAATTGAACCATTTCCTT | 6247 | AAGGAAATGGTTCAATTTC |
| 2687 | AAATTGAACCATTTCCTTC | 6248 | GAAGGAAATGGTTCAATTT |
| 2688 | AATTGAACCATTTCCTTCA | 6249 | TGAAGGAAATGGTTCAATT |
| 2689 | ATTGAACCATTTCCTTCAC | 6250 | GTGAAGGAAATGGTTCAAT |
| 2690 | TTGAACCATTTCCTTCACA | 6251 | TGTGAAGGAAATGGTTCAA |
| 2691 | TGAACCATTTCCTTCACAC | 6252 | GTGTGAAGGAAATGGTTCA |
| 2692 | GAACCATTTCCTTCACACC | 6253 | GGTGTGAAGGAAATGGTTC |
| 2693 | AACCATTTCCTTCACACCA | 6254 | TGGTGTGAAGGAAATGGTT |
| 2694 | ACCATTTCCTTCACACCAG | 6255 | CTGGTGTGAAGGAAATGGT |
| 2695 | CCATTTCCTTCACACCAGG | 6256 | CCTGGTGTGAAGGAAATGG |
| 2696 | CATTTCCTTCACACCAGGC | 6257 | GCCTGGTGTGAAGGAAATG |
| 2697 | ATTTCCTTCACACCAGGCT | 6258 | AGCCTGGTGTGAAGGAAAT |
| 2698 | TTTCCTTCACACCAGGCTT | 6259 | AAGCCTGGTGTGAAGGAAA |
| 2699 | TTCCTTCACACCAGGCTTG | 6260 | CAAGCCTGGTGTGAAGGAA |
| 2700 | TCCTTCACACCAGGCTTGT | 6261 | ACAAGCCTGGTGTGAAGGA |
| 2701 | CCTTCACACCAGGCTTGTA | 6262 | TACAAGCCTGGTGTGAAGG |
| 2702 | CTTCACACCAGGCTTGTAT | 6263 | ATACAAGCCTGGTGTGAAG |
| 2703 | TTCACACCAGGCTTGTATA | 6264 | TATACAAGCCTGGTGTGAA |
| 2704 | TCACACCAGGCTTGTATAC | 6265 | GTATACAAGCCTGGTGTGA |
| 2705 | CACACCAGGCTTGTATACC | 6266 | GGTATACAAGCCTGGTGTG |
| 2706 | ACACCAGGCTTGTATACCA | 6267 | TGGTATACAAGCCTGGTGT |
| 2707 | CACCAGGCTTGTATACCAA | 6268 | TTGGTATACAAGCCTGGTG |
| 2708 | ACCAGGCTTGTATACCAAT | 6269 | ATTGGTATACAAGCCTGGT |
| 2709 | CCAGGCTTGTATACCAATC | 6270 | GATTGGTATACAAGCCTGG |
| 2710 | CAGGCTTGTATACCAATCA | 6271 | TGATTGGTATACAAGCCTG |
| 2711 | AGGCTTGTATACCAATCAG | 6272 | CTGATTGGTATACAAGCCT |
| 2712 | GGCTTGTATACCAATCAGT | 6273 | ACTGATTGGTATACAAGCC |
| 2713 | GCTTGTATACCAATCAGTA | 6274 | TACTGATTGGTATACAAGC |
| 2714 | CTTGTATACCAATCAGTAC | 6275 | GTACTGATTGGTATACAAG |
| 2715 | TTGTATACCAATCAGTACT | 6276 | AGTACTGATTGGTATACAA |
| 2716 | TGTATACCAATCAGTACTG | 6277 | CAGTACTGATTGGTATACA |
| 2717 | GTATACCAATCAGTACTGA | 6278 | TCAGTACTGATTGGTATAC |
| 2718 | TATACCAATCAGTACTGAC | 6279 | GTCAGTACTGATTGGTATA |
| 2719 | ATACCAATCAGTACTGACC | 6280 | GGTCAGTACTGATTGGTAT |
| 2720 | TACCAATCAGTACTGACCT | 6281 | AGGTCAGTACTGATTGGTA |
| 2721 | ACCAATCAGTACTGACCTC | 6282 | GAGGTCAGTACTGATTGGT |
| 2722 | CCAATCAGTACTGACCTCC | 6283 | GGAGGTCAGTACTGATTGG |
| 2723 | CAATCAGTACTGACCTCCC | 6284 | GGGAGGTCAGTACTGATTG |
| 2724 | AATCAGTACTGACCTCCCT | 6285 | AGGGAGGTCAGTACTGATT |
| 2725 | ATCAGTACTGACCTCCCTT | 6286 | AAGGGAGGTCAGTACTGAT |
| 2726 | TCAGTACTGACCTCCCTTT | 6287 | AAAGGGAGGTCAGTACTGA |
| 2727 | CAGTACTGACCTCCCTTTG | 6288 | CAAAGGGAGGTCAGTACTG |
| 2728 | AGTACTGACCTCCCTTTGC | 6289 | GCAAAGGGAGGTCAGTACT |
| 2729 | GTACTGACCTCCCTTTGCT | 6290 | AGCAAAGGGAGGTCAGTAC |
| 2730 | TACTGACCTCCCTTTGCTC | 6291 | GAGCAAAGGGAGGTCAGTA |
| 2731 | ACTGACCTCCCTTTGCTCG | 6292 | CGAGCAAAGGGAGGTCAGT |
| 2732 | CTGACCTCCCTTTGCTCGG | 6293 | CCGAGCAAAGGGAGGTCAG |
| 2733 | TGACCTCCCTTTGCTCGGA | 6294 | TCCGAGCAAAGGGAGGTCA |
| 2734 | GACCTCCCTTTGCTCGGAC | 6295 | GTCCGAGCAAAGGGAGGTC |
| 2735 | ACCTCCCTTTGCTCGGACC | 6296 | GGTCCGAGCAAAGGGAGGT |
| 2736 | CCTCCCTTTGCTCGGACCT | 6297 | AGGTCCGAGCAAAGGGAGG |
| 2737 | CTCCCTTTGCTCGGACCTA | 6298 | TAGGTCCGAGCAAAGGGAG |
| 2738 | TCCCTTTGCTCGGACCTAA | 6299 | TTAGGTCCGAGCAAAGGGA |
| 2739 | CCCTTTGCTCGGACCTAAT | 6300 | ATTAGGTCCGAGCAAAGGG |
| 2740 | CCTTTGCTCGGACCTAATT | 6301 | AATTAGGTCCGAGCAAAGG |
| 2741 | CTTTGCTCGGACCTAATTA | 6302 | TAATTAGGTCCGAGCAAAG |
| 2742 | TTTGCTCGGACCTAATTAC | 6303 | GTAATTAGGTCCGAGCAAA |
| 2743 | TTGCTCGGACCTAATTACT | 6304 | AGTAATTAGGTCCGAGCAA |
| 2744 | TGCTCGGACCTAATTACTT | 6305 | AAGTAATTAGGTCCGAGCA |
| 2745 | GCTCGGACCTAATTACTTT | 6306 | AAAGTAATTAGGTCCGAGC |
| 2746 | CTCGGACCTAATTACTTTG | 6307 | CAAAGTAATTAGGTCCGAG |
| 2747 | TCGGACCTAATTACTTTGT | 6308 | ACAAAGTAATTAGGTCCGA |
| 2748 | CGGACCTAATTACTTTGTT | 6309 | AACAAAGTAATTAGGTCCG |
| 2749 | GGACCTAATTACTTTGTTA | 6310 | TAACAAAGTAATTAGGTCC |
| 2750 | GACCTAATTACTTTGTTAA | 6311 | TTAACAAAGTAATTAGGTC |
| 2751 | ACCTAATTACTTTGTTAAT | 6312 | ATTAACAAAGTAATTAGGT |
| 2752 | CCTAATTACTTTGTTAATG | 6313 | CATTAACAAAGTAATTAGG |
| 2753 | CTAATTACTTTGTTAATGA | 6314 | TCATTAACAAAGTAATTAG |
| 2754 | TAATTACTTTGTTAATGAA | 6315 | TTCATTAACAAAGTAATTA |
| 2755 | AATTACTTTGTTAATGAAT | 6316 | ATTCATTAACAAAGTAATT |
| 2756 | ATTACTTTGTTAATGAATC | 6317 | GATTCATTAACAAAGTAAT |
| 2757 | TTACTTTGTTAATGAATCT | 6318 | AGATTCATTAACAAAGTAA |
| 2758 | TACTTTGTTAATGAATCTT | 6319 | AAGATTCATTAACAAAGTA |
| 2759 | ACTTTGTTAATGAATCTTC | 6320 | GAAGATTCATTAACAAAGT |
| 2760 | CTTTGTTAATGAATCTTCA | 6321 | TGAAGATTCATTAACAAAG |
| 2761 | TTTGTTAATGAATCTTCAG | 6322 | CTGAAGATTCATTAACAAA |
| 2762 | TTGTTAATGAATCTTCAGG | 6323 | CCTGAAGATTCATTAACAA |
| 2763 | TGTTAATGAATCTTCAGGA | 6324 | TCCTGAAGATTCATTAACA |
| 2764 | GTTAATGAATCTTCAGGAT | 6325 | ATCCTGAAGATTCATTAAC |
| 2765 | TTAATGAATCTTCAGGATT | 6326 | AATCCTGAAGATTCATTAA |
| 2766 | TAATGAATCTTCAGGATTG | 6327 | CAATCCTGAAGATTCATTA |
| 2767 | AATGAATCTTCAGGATTGA | 6328 | TCAATCCTGAAGATTCATT |
| 2768 | ATGAATCTTCAGGATTGAC | 6329 | GTCAATCCTGAAGATTCAT |
| 2769 | TGAATCTTCAGGATTGACT | 6330 | AGTCAATCCTGAAGATTCA |
| 2770 | GAATCTTCAGGATTGACTC | 6331 | GAGTCAATCCTGAAGATTC |
| 2771 | AATCTTCAGGATTGACTCC | 6332 | GGAGTCAATCCTGAAGATT |
| 2772 | ATCTTCAGGATTGACTCCC | 6333 | GGGAGTCAATCCTGAAGAT |
| 2773 | TCTTCAGGATTGACTCCCT | 6334 | AGGGAGTCAATCCTGAAGA |
| 2774 | CTTCAGGATTGACTCCCTC | 6335 | GAGGGAGTCAATCCTGAAG |
| 2775 | TTCAGGATTGACTCCCTCA | 6336 | TGAGGGAGTCAATCCTGAA |
| 2776 | TCAGGATTGACTCCCTCAG | 6337 | CTGAGGGAGTCAATCCTGA |
| 2777 | CAGGATTGACTCCCTCAGA | 6338 | TCTGAGGGAGTCAATCCTG |
| 2778 | AGGATTGACTCCCTCAGAA | 6339 | TTCTGAGGGAGTCAATCCT |
| 2779 | GGATTGACTCCCTCAGAAG | 6340 | CTTCTGAGGGAGTCAATCC |
| 2780 | GATTGACTCCCTCAGAAGT | 6341 | ACTTCTGAGGGAGTCAATC |
| 2781 | ATTGACTCCCTCAGAAGTT | 6342 | AACTTCTGAGGGAGTCAAT |
| 2782 | TTGACTCCCTCAGAAGTTG | 6343 | CAACTTCTGAGGGAGTCAA |
| 2783 | TGACTCCCTCAGAAGTTGA | 6344 | TCAACTTCTGAGGGAGTCA |
| 2784 | GACTCCCTCAGAAGTTGAA | 6345 | TTCAACTTCTGAGGGAGTC |
| 2785 | ACTCCCTCAGAAGTTGAAT | 6346 | ATTCAACTTCTGAGGGAGT |
| 2786 | CTCCCTCAGAAGTTGAATT | 6347 | AATTCAACTTCTGAGGGAG |
| 2787 | TCCCTCAGAAGTTGAATTC | 6348 | GAATTCAACTTCTGAGGGA |
| 2788 | CCCTCAGAAGTTGAATTCC | 6349 | GGAATTCAACTTCTGAGGG |
| 2789 | CCTCAGAAGTTGAATTCCA | 6350 | TGGAATTCAACTTCTGAGG |
| 2790 | CTCAGAAGTTGAATTCCAA | 6351 | TTGGAATTCAACTTCTGAG |
| 2791 | TCAGAAGTTGAATTCCAAG | 6352 | CTTGGAATTCAACTTCTGA |
| 2792 | CAGAAGTTGAATTCCAAGA | 6353 | TCTTGGAATTCAACTTCTG |
| 2793 | AGAAGTTGAATTCCAAGAA | 6354 | TTCTTGGAATTCAACTTCT |
| 2794 | GAAGTTGAATTCCAAGAAG | 6355 | CTTCTTGGAATTCAACTTC |
| 2795 | AAGTTGAATTCCAAGAAGA | 6356 | TCTTCTTGGAATTCAACTT |
| 2796 | AGTTGAATTCCAAGAAGAA | 6357 | TTCTTCTTGGAATTCAACT |
| 2797 | GTTGAATTCCAAGAAGAAA | 6358 | TTTCTTCTTGGAATTCAAC |
| 2798 | TTGAATTCCAAGAAGAAAT | 6359 | ATTTCTTCTTGGAATTCAA |
| 2799 | TGAATTCCAAGAAGAAATG | 6360 | CATTTCTTCTTGGAATTCA |
| 2800 | GAATTCCAAGAAGAAATGG | 6361 | CCATTTCTTCTTGGAATTC |
| 2801 | AATTCCAAGAAGAAATGGC | 6362 | GCCATTTCTTCTTGGAATT |
| 2802 | ATTCCAAGAAGAAATGGCA | 6363 | TGCCATTTCTTCTTGGAAT |
| 2803 | TTCCAAGAAGAAATGGCAG | 6364 | CTGCCATTTCTTCTTGGAA |
| 2804 | TCCAAGAAGAAATGGCAGC | 6365 | GCTGCCATTTCTTCTTGGA |
| 2805 | CCAAGAAGAAATGGCAGCA | 6366 | TGCTGCCATTTCTTCTTGG |
| 2806 | CAAGAAGAAATGGCAGCAT | 6367 | ATGCTGCCATTTCTTCTTG |
| 2807 | AAGAAGAAATGGCAGCATC | 6368 | GATGCTGCCATTTCTTCTT |
| 2808 | AGAAGAAATGGGAGCATCT | 6369 | AGATGCTGCCATTTCTTCT |
| 2809 | GAAGAAATGGCAGCATCTG | 6370 | CAGATGCTGCCATTTCTTC |
| 2810 | AAGAAATGGCAGCATCTGA | 6371 | TCAGATGCTGCCATTTCTT |
| 2811 | AGAAATGGCAGCATCTGAA | 6372 | TTCAGATGCTGCCATTTCT |
| 2812 | GAAATGGCAGCATCTGAAC | 6373 | GTTCAGATGCTGCCATTTC |
| 2813 | AAATGGCAGCATCTGAACC | 6374 | GGTTCAGATGCTGCCATTT |
| 2814 | AATGGCAGCATCTGAACCC | 6375 | GGGTTCAGATGCTGCCATT |
| 2815 | ATGGCAGCATCTGAACCCG | 6376 | CGGGTTCAGATGCTGCCAT |
| 2816 | TGGCAGCATCTGAACCCGT | 6377 | ACGGGTTCAGATGCTGCCA |
| 2817 | GGCAGCATCTGAACCCGTG | 6378 | CACGGGTTCAGATGCTGCC |
| 2818 | GCAGCATCTGAACCCGTGG | 6379 | CCACGGGTTCAGATGCTGC |
| 2819 | CAGCATCTGAACCCGTGGT | 6380 | ACCACGGGTTCAGATGCTG |
| 2820 | AGCATCTGAACCCGTGGTC | 6381 | GACCACGGGTTCAGATGCT |
| 2821 | GCATCTGAACCCGTGGTCC | 6382 | GGACCACGGGTTCAGATGC |
| 2822 | CATCTGAACCCGTGGTCCA | 6383 | TGGACCACGGGTTCAGATG |
| 2823 | ATCTGAACCCGTGGTCCAT | 6384 | ATGGACCACGGGTTCAGAT |
| 2824 | TCTGAACCCGTGGTCCATG | 6385 | CATGGACCACGGGTTCAGA |
| 2825 | CTGAACCCGTGGTCCATGG | 6386 | CCATGGACCACGGGTTCAG |
| 2826 | TGAACCCGTGGTCCATGGG | 6387 | CCCATGGACCACGGGTTCA |
| 2827 | GAACCCGTGGTCCATGGGG | 6388 | CCCCATGGACCACGGGTTC |
| 2828 | AACCCGTGGTCCATGGGGA | 6389 | TCCCCATGGACCACGGGTT |
| 2829 | ACCCGTGGTCCATGGGGAT | 6390 | ATCCCCATGGACCACGGGT |
| 2830 | CCCGTGGTCCATGGGGATA | 6391 | TATCCCCATGGACCACGGG |
| 2831 | CCGTGGTCCATGGGGATAT | 6392 | ATATCCCCATGGACCACGG |
| 2832 | CGTGGTCCATGGGGATATT | 6393 | AATATCCCCATGGACCACG |
| 2833 | GTGGTCCATGGGGATATTA | 6394 | TAATATCCCCATGGACCAC |
| 2834 | TGGTCCATGGGGATATTAT | 6395 | ATAATATCCCCATGGACCA |
| 2835 | GGTCCATGGGGATATTATT | 6396 | AATAATATCCCCATGGACC |
| 2836 | GTCCATGGGGATATTATTG | 6397 | CAATAATATCCCCATGGAC |
| 2837 | TCCATGGGGATATTATTGT | 6398 | ACAATAATATCCCCATGGA |
| 2838 | CCATGGGGATATTATTGTG | 6399 | CACAATAATATCCCCATGG |
| 2839 | CATGGGGATATTATTGTGA | 6400 | TCACAATAATATCCCCATG |
| 2840 | ATGGGGATATTATTGTGAC | 6401 | GTCACAATAATATCCCCAT |
| 2841 | TGGGGATATTATTGTGACT | 6402 | AGTCACAATAATATCCCCA |
| 2842 | GGGGATATTATTGTGACTG | 6403 | CAGTCACAATAATATCCCC |
| 2843 | GGGATATTATTGTGACTGA | 6404 | TCAGTCACAATAATATCCC |
| 2844 | GGATATTATTGTGACTGAG | 6405 | CTCAGTCACAATAATATCC |
| 2845 | GATATTATTGTGACTGAGA | 6406 | TCTCAGTCACAATAATATC |
| 2846 | ATATTATTGTGACTGAGAC | 6407 | GTCTCAGTCACAATAATAT |
| 2847 | TATTATTGTGACTGAGACT | 6408 | AGTCTCAGTCACAATAATA |
| 2848 | ATTATTGTGACTGAGACTT | 6409 | AAGTCTCAGTCACAATAAT |
| 2849 | TTATTGTGACTGAGACTTA | 6410 | TAAGTCTCAGTCACAATAA |
| 2850 | TATTGTGACTGAGACTTAC | 6411 | GTAAGTCTCAGTCACAATA |
| 2851 | ATTGTGACTGAGACTTACG | 6412 | CGTAAGTCTCAGTCACAAT |
| 2852 | TTGTGACTGAGACTTACGG | 6413 | CCGTAAGTCTCAGTCACAA |
| 2853 | TGTGACTGAGACTTACGGT | 6414 | ACCGTAAGTCTCAGTCACA |
| 2854 | GTGACTGAGACTTACGGTA | 6415 | TACCGTAAGTCTCAGTCAC |
| 2855 | TGACTGAGACTTACGGTAA | 6416 | TTACCGTAAGTCTCAGTCA |
| 2856 | GACTGAGACTTACGGTAAT | 6417 | ATTACCGTAAGTCTCAGTC |
| 2857 | ACTGAGACTTACGGTAATG | 6418 | CATTACCGTAAGTCTCAGT |
| 2858 | CTGAGACTTACGGTAATGC | 6419 | GCATTACCGTAAGTCTCAG |
| 2859 | TGAGACTTACGGTAATGCT | 6420 | AGCATTACCGTAAGTCTCA |
| 2860 | GAGACTTACGGTAATGCTG | 6421 | CAGCATTACCGTAAGTCTC |
| 2861 | AGACTTACGGTAATGCTGA | 6422 | TCAGCATTACCGTAAGTCT |
| 2862 | GACTTACGGTAATGCTGAT | 6423 | ATCAGCATTACCGTAAGTC |
| 2863 | ACTTACGGTAATGCTGATC | 6424 | GATCAGCATTACCGTAAGT |
| 2864 | CTTACGGTAATGCTGATCC | 6425 | GGATCAGCATTACCGTAAG |
| 2865 | TTACGGTAATGCTGATCCA | 6426 | TGGATCAGCATTACCGTAA |
| 2866 | TACGGTAATGCTGATCCAT | 6427 | ATGGATCAGCATTACCGTA |
| 2867 | ACGGTAATGCTGATCCATG | 6428 | CATGGATCAGCATTACCGT |
| 2868 | CGGTAATGCTGATCCATGT | 6429 | ACATGGATCAGCATTACCG |
| 2869 | GGTAATGCTGATCCATGTG | 6430 | CACATGGATCAGCATTACC |
| 2870 | GTAATGCTGATCCATGTGT | 6431 | ACACATGGATCAGCATTAC |
| 2871 | TAATGCTGATCCATGTGTG | 6432 | CACACATGGATCAGCATTA |
| 2872 | AATGCTGATCCATGTGTGC | 6433 | GCACACATGGATCAGCATT |
| 2873 | ATGCTGATCCATGTGTGCA | 6434 | TGCACACATGGATCAGCAT |
| 2874 | TGCTGATCCATGTGTGCAA | 6435 | TTGCACACATGGATCAGCA |
| 2875 | GCTGATCCATGTGTGCAAC | 6436 | GTTGCACACATGGATCAGC |
| 2876 | CTGATCCATGTGTGCAACC | 6437 | GGTTGCACACATGGATCAG |
| 2877 | TGATCCATGTGTGCAACCC | 6438 | GGGTTGCACACATGGATCA |
| 2878 | GATCCATGTGTGCAACCCA | 6439 | TGGGTTGCACACATGGATC |
| 2879 | ATCCATGTGTGCAACCCAC | 6440 | GTGGGTTGCACACATGGAT |
| 2880 | TCCATGTGTGCAACCCACT | 6441 | AGTGGGTTGCACACATGGA |
| 2881 | CCATGTGTGCAACCCACTA | 6442 | TAGTGGGTTGCACACATGG |
| 2882 | CATGTGTGCAACCCACTAC | 6443 | GTAGTGGGTTGCACACATG |
| 2883 | ATGTGTGCAACCCACTACA | 6444 | TGTAGTGGGTTGCACACAT |
| 2884 | TGTGTGCAACCCACTACAA | 6445 | TTGTAGTGGGTTGCACACA |
| 2885 | GTGTGCAACCCACTACAAT | 6446 | ATTGTAGTGGGTTGCACAC |
| 2886 | TGTGCAACCCACTACAATT | 6447 | AATTGTAGTGGGTTGCACA |
| 2887 | GTGCAACCCACTACAATTA | 6448 | TAATTGTAGTGGGTTGCAC |
| 2888 | TGCAACCCACTACAATTAT | 6449 | ATAATTGTAGTGGGTTGCA |
| 2889 | GCAACCCACTACAATTATT | 6450 | AATAATTGTAGTGGGTTGC |
| 2890 | CAACCCACTACAATTATTT | 6451 | AAATAATTGTAGTGGGTTG |
| 2891 | AACCCACTACAATTATTTT | 6452 | AAAATAATTGTAGTGGGTT |
| 2892 | ACCCACTACAATTATTTTT | 6453 | AAAAATAATTGTAGTGGGT |
| 2893 | CCCACTACAATTATTTTTG | 6454 | CAAAAATAATTGTAGTGGG |
| 2894 | CCACTACAATTATTTTTGA | 6455 | TCAAAAATAATTGTAGTGG |
| 2895 | CACTACAATTATTTTTGAT | 6456 | ATCAAAAATAATTGTAGTG |
| 2896 | ACTACAATTATTTTTGATC | 6457 | GATCAAAAATAATTGTAGT |
| 2897 | CTACAATTATTTTTGATCC | 6458 | GGATCAAAAATAATTGTAG |
| 2898 | TACAATTATTTTTGATCCT | 6459 | AGGATCAAAAATAATTGTA |
| 2899 | ACAATTATTTTTGATCCTC | 6460 | GAGGATCAAAAATAATTGT |
| 2900 | CAATTATTTTTGATCCTCA | 6461 | TGAGGATCAAAAATAATTG |
| 2901 | AATTATTTTTGATCCTCAG | 6462 | CTGAGGATCAAAAATAATT |
| 2902 | ATTATTTTTGATCCTCAGC | 6463 | GCTGAGGATCAAAAATAAT |
| 2903 | TTATTTTTGATCCTCAGCT | 6464 | AGCTGAGGATCAAAAATAA |
| 2904 | TATTTTTGATCCTCAGCTT | 6465 | AAGCTGAGGATCAAAAATA |
| 2905 | ATTTTTGATCCTCAGCTTG | 6466 | CAAGCTGAGGATCAAAAAT |
| 2906 | TTTTTGATCCTCAGCTTGC | 6467 | GCAAGCTGAGGATCAAAAA |
| 2907 | TTTTGATCCTCAGCTTGCA | 6468 | TGCAAGCTGAGGATCAAAA |
| 2908 | TTTGATCCTCAGCTTGCAC | 6469 | GTGCAAGCTGAGGATCAAA |
| 2909 | TTGATCCTCAGCTTGCACC | 6470 | GGTGCAAGCTGAGGATCAA |
| 2910 | TGATCCTCAGCTTGCACCC | 6471 | GGGTGCAAGCTGAGGATCA |
| 2911 | GATCCTCAGCTTGCACCCA | 6472 | TGGGTGCAAGCTGAGGATC |
| 2912 | ATCCTCAGCTTGCACCCAA | 6473 | TTGGGTGCAAGCTGAGGAT |
| 2913 | TCCTCAGCTTGCACCCAAT | 6474 | ATTGGGTGCAAGCTGAGGA |
| 2914 | CCTCAGCTTGCACCCAATG | 6475 | CATTGGGTGCAAGCTGAGG |
| 2915 | CTCAGCTTGCACCCAATGT | 6476 | ACATTGGGTGCAAGCTGAG |
| 2916 | TCAGCTTGCACCCAATGTT | 6477 | AACATTGGGTGCAAGCTGA |
| 2917 | CAGCTTGCACCCAATGTTG | 6478 | CAACATTGGGTGCAAGCTG |
| 2918 | AGCTTGCACCCAATGTTGT | 6479 | ACAACATTGGGTGCAAGCT |
| 2919 | GCTTGCACCCAATGTTGTA | 6480 | TACAACATTGGGTGCAAGC |
| 2920 | CTTGCACCCAATGTTGTAG | 6481 | CTACAACATTGGGTGCAAG |
| 2921 | TTGCACCCAATGTTGTAGT | 6482 | ACTACAACATTGGGTGCAA |
| 2922 | TGCACCCAATGTTGTAGTA | 6483 | TACTACAACATTGGGTGCA |
| 2923 | GCACCCAATGTTGTAGTAA | 6484 | TTACTACAACATTGGGTGC |
| 2924 | CACCCAATGTTGTAGTAAC | 6485 | GTTACTACAACATTGGGTG |
| 2925 | ACCCAATGTTGTAGTAACC | 6486 | GGTTACTACAACATTGGGT |
| 2926 | CCCAATGTTGTAGTAACCG | 6487 | CGGTTACTACAACATTGGG |
| 2927 | CCAATGTTGTAGTAACCGA | 6488 | TCGGTTACTACAACATTGG |
| 2928 | CAATGTTGTAGTAACCGAA | 6489 | TTCGGTTACTACAACATTG |
| 2929 | AATGTTGTAGTAACCGAAG | 6490 | CTTCGGTTACTACAACATT |
| 2930 | ATGTTGTAGTAACCGAAGC | 6491 | GCTTCGGTTACTACAACAT |
| 2931 | TGTTGTAGTAACCGAAGCA | 6492 | TGCTTCGGTTACTACAACA |
| 2932 | GTTGTAGTAACCGAAGCAG | 6493 | CTGCTTCGGTTACTACAAC |
| 2933 | TTGTAGTAACCGAAGCAGT | 6494 | ACTGCTTCGGTTACTACAA |
| 2934 | TGTAGTAACCGAAGCAGTA | 6495 | TACTGCTTCGGTTACTACA |
| 2935 | GTAGTAACCGAAGCAGTAA | 6496 | TTACTGCTTCGGTTACTAC |
| 2936 | TAGTAACCGAAGCAGTAAT | 6497 | ATTACTGCTTCGGTTACTA |
| 2937 | AGTAACCGAAGCAGTAATG | 6498 | CATTACTGCTTCGGTTACT |
| 2938 | GTAACCGAAGCAGTAATGG | 6499 | CCATTACTGCTTCGGTTAC |
| 2939 | TAACCGAAGCAGTAATGGC | 6500 | GCCATTACTGCTTCGGTTA |
| 2940 | AACCGAAGCAGTAATGGCA | 6501 | TGCCATTACTGCTTCGGTT |
| 2941 | ACCGAAGCAGTAATGGCAC | 6502 | GTGCCATTACTGCTTCGGT |
| 2942 | CCGAAGCAGTAATGGCACC | 6503 | GGTGCCATTACTGCTTCGG |
| 2943 | CGAAGCAGTAATGGCACCT | 6504 | AGGTGCCATTACTGCTTCG |
| 2944 | GAAGCAGTAATGGCACCTG | 6505 | CAGGTGCCATTACTGCTTC |
| 2945 | AAGCAGTAATGGCACCTGT | 6506 | ACAGGTGCCATTACTGCTT |
| 2946 | AGCAGTAATGGCACCTGTC | 6507 | GACAGGTGCCATTACTGCT |
| 2947 | GCAGTAATGGCACCTGTCT | 6508 | AGACAGGTGCCATTACTGC |
| 2948 | CAGTAATGGCACCTGTCTA | 6509 | TAGACAGGTGCCATTACTG |
| 2949 | AGTAATGGCACCTGTCTAT | 6510 | ATAGACAGGTGCCATTACT |
| 2950 | GTAATGGCACCTGTCTATG | 6511 | CATAGACAGGTGCCATTAC |
| 2951 | TAATGGCACCTGTCTATGA | 6512 | TCATAGACAGGTGCCATTA |
| 2952 | AATGGCACCTGTCTATGAT | 6513 | ATCATAGACAGGTGCCATT |
| 2953 | ATGGCACCTGTCTATGATA | 6514 | TATCATAGACAGGTGCCAT |
| 2954 | TGGCACCTGTCTATGATAT | 6515 | ATATCATAGACAGGTGCCA |
| 2955 | GGCACCTGTCTATGATATT | 6516 | AATATCATAGACAGGTGCC |
| 2956 | GCACCTGTCTATGATATTC | 6517 | GAATATCATAGACAGGTGC |
| 2957 | CACCTGTCTATGATATTCA | 6518 | TGAATATCATAGACAGGTG |
| 2958 | ACCTGTCTATGATATTCAA | 6519 | TTGAATATCATAGACAGGT |
| 2959 | CCTGTCTATGATATTCAAG | 6520 | CTTGAATATCATAGACAGG |
| 2960 | CTGTCTATGATATTCAAGG | 6521 | CCTTGAATATCATAGACAG |
| 2961 | TGTCTATGATATTCAAGGG | 6522 | CCCTTGAATATCATAGACA |
| 2962 | GTCTATGATATTCAAGGGA | 6523 | TCCCTTGAATATCATAGAC |
| 2963 | TCTATGATATTCAAGGGAA | 6524 | TTCCCTTGAATATCATAGA |
| 2964 | CTATGATATTCAAGGGAAT | 6525 | ATTCCCTTGAATATCATAG |
| 2965 | TATGATATTCAAGGGAATA | 6526 | TATTCCCTTGAATATCATA |
| 2966 | ATGATATTCAAGGGAATAT | 6527 | ATATTCCCTTGAATATCAT |
| 2967 | TGATATTCAAGGGAATATT | 6528 | AATATTCCCTTGAATATCA |
| 2968 | GATATTCAAGGGAATATTT | 6529 | AAATATTCCCTTGAATATC |
| 2969 | ATATTCAAGGGAATATTTG | 6530 | CAAATATTCCCTTGAATAT |
| 2970 | TATTCAAGGGAATATTTGT | 6531 | ACAAATATTCCCTTGAATA |
| 2971 | ATTCAAGGGAATATTTGTG | 6532 | CACAAATATTCCCTTGAAT |
| 2972 | TTCAAGGGAATATTTGTGT | 6533 | ACACAAATATTCCCTTGAA |
| 2973 | TCAAGGGAATATTTGTGTA | 6534 | TACACAAATATTCCCTTGA |
| 2974 | CAAGGGAATATTTGTGTAC | 6535 | GTACACAAATATTCCCTTG |
| 2975 | AAGGGAATATTTGTGTACC | 6536 | GGTACACAAATATTCCCTT |
| 2976 | AGGGAATATTTGTGTACCT | 6537 | AGGTACACAAATATTCCCT |
| 2977 | GGGAATATTTGTGTACCTG | 6538 | GAGGTACACAAATATTCCC |
| 2978 | GGAATATTTGTGTACCTGC | 6539 | GCAGGTACACAAATATTCC |
| 2979 | GAATATTTGTGTACCTGCT | 6540 | AGCAGGTACACAAATATTC |
| 2980 | AATATTTGTGTACCTGCTG | 6541 | CAGCAGGTACACAAATATT |
| 2981 | ATATTTGTGTACCTGCTGA | 6542 | TCAGCAGGTACACAAATAT |
| 2982 | TATTTGTGTACCTGCTGAG | 6543 | CTCAGCAGGTACACAAATA |
| 2983 | ATTTGTGTACCTGCTGAGT | 6544 | ACTCAGCAGGTACACAAAT |
| 2984 | TTTGTGTACCTGCTGAGTT | 6545 | AACTCAGCAGGTACACAAA |
| 2985 | TTGTGTACCTGCTGAGTTA | 6546 | TAACTCAGCAGGTACACAA |
| 2986 | TGTGTACCTGCTGAGTTAG | 6547 | CTAACTCAGCAGGTACACA |
| 2987 | GTGTACCTGCTGAGTTAGC | 6548 | GCTAACTCAGCAGGTACAC |
| 2988 | TGTACCTGCTGAGTTAGCA | 6549 | TGCTAACTCAGCAGGTACA |
| 2989 | GTACCTGCTGAGTTAGCAG | 6550 | CTGCTAACTCAGCAGGTAC |
| 2990 | TACCTGCTGAGTTAGCAGA | 6551 | TCTGCTAACTCAGCAGGTA |
| 2991 | ACCTGCTGAGTTAGCAGAT | 6552 | ATCTGCTAACTCAGCAGGT |
| 2992 | CCTGCTGAGTTAGCAGATT | 6553 | AATCTGCTAACTCAGCAGG |
| 2993 | CTGCTGAGTTAGCAGATTA | 6554 | TAATCTGCTAACTCAGCAG |
| 2994 | TGCTGAGTTAGCAGATTAC | 6555 | GTAATCTGCTAACTCAGCA |
| 2995 | GCTGAGTTAGCAGATTACA | 6556 | TGTAATCTGCTAACTCAGC |
| 2996 | CTGAGTTAGCAGATTACAA | 6557 | TTGTAATCTGCTAACTCAG |
| 2997 | TGAGTTAGCAGATTACAAC | 6558 | GTTGTAATCTGCTAACTCA |
| 2998 | GAGTTAGCAGATTACAACA | 6559 | TGTTGTAATCTGCTAACTC |
| 2999 | AGTTAGCAGATTACAACAA | 6560 | TTGTTGTAATCTGCTAACT |
| 3000 | GTTAGCAGATTACAACAAT | 6561 | ATTGTTGTAATCTGCTAAC |
| 3001 | TTAGCAGATTACAACAATG | 6562 | CATTGTTGTAATCTGCTAA |
| 3002 | TAGCAGATTACAACAATGT | 6563 | ACATTGTTGTAATCTGCTA |
| 3003 | AGCAGATTACAACAATGTA | 6564 | TACATTGTTGTAATCTGCT |
| 3004 | GCAGATTACAACAATGTAA | 6565 | TTACATTGTTGTAATCTGC |
| 3005 | CAGATTACAACAATGTAAT | 6566 | ATTACATTGTTGTAATCTG |
| 3006 | AGATTACAACAATGTAATC | 6567 | GATTACATTGTTGTAATCT |
| 3007 | GATTACAACAATGTAATCT | 6568 | AGATTACATTGTTGTAATC |
| 3008 | ATTACAACAATGTAATCTA | 6569 | TAGATTACATTGTTGTAAT |
| 3009 | TTACAACAATGTAATCTAT | 6570 | ATAGATTACATTGTTGTAA |
| 3010 | TACAACAATGTAATCTATG | 6571 | CATAGATTACATTGTTGTA |
| 3011 | ACAACAATGTAATCTATGC | 6572 | GCATAGATTACATTGTTGT |
| 3012 | CAACAATGTAATCTATGCT | 6573 | AGCATAGATTACATTGTTG |
| 3013 | AACAATGTAATCTATGCTG | 6574 | CAGCATAGATTACATTGTT |
| 3014 | ACAATGTAATCTATGCTGA | 6575 | TCAGCATAGATTACATTGT |
| 3015 | CAATGTAATCTATGCTGAG | 6576 | CTCAGCATAGATTACATTG |
| 3016 | AATGTAATCTATGCTGAGA | 6577 | TCTCAGCATAGATTACATT |
| 3017 | ATGTAATCTATGCTGAGAG | 6578 | CTCTCAGCATAGATTACAT |
| 3018 | TGTAATCTATGCTGAGAGA | 6579 | TCTCTCAGCATAGATTACA |
| 3019 | GTAATCTATGCTGAGAGAG | 6580 | CTCTCTCAGCATAGATTAC |
| 3020 | TAATCTATGCTGAGAGAGT | 6581 | ACTCTCTCAGCATAGATTA |
| 3021 | AATCTATGCTGAGAGAGTA | 6582 | TACTCTCTCAGCATAGATT |
| 3022 | ATCTATGCTGAGAGAGTAC | 6583 | GTACTCTCTCAGCATAGAT |
| 3023 | TCTATGCTGAGAGAGTACT | 6584 | AGTACTCTCTCAGCATAGA |
| 3024 | CTATGCTGAGAGAGTACTG | 6585 | CAGTACTCTCTCAGCATAG |
| 3025 | TATGCTGAGAGAGTACTGG | 6586 | CCAGTACTCTCTCAGCATA |
| 3026 | ATGCTGAGAGAGTACTGGC | 6587 | GCCAGTACTCTCTCAGCAT |
| 3027 | TGCTGAGAGAGTACTGGCT | 6588 | AGCCAGTACTCTCTCAGCA |
| 3028 | GCTGAGAGAGTACTGGCTA | 6589 | TAGCCAGTACTCTCTCAGC |
| 3029 | CTGAGAGAGTACTGGCTAG | 6590 | CTAGCCAGTACTCTCTCAG |
| 3030 | TGAGAGAGTACTGGCTAGT | 6591 | ACTAGCCAGTACTCTCTCA |
| 3031 | GAGAGAGTACTGGCTAGTC | 6592 | GACTAGCCAGTACTCTCTC |
| 3032 | AGAGAGTACTGGCTAGTCC | 6593 | GGACTAGCCAGTACTCTCT |
| 3033 | GAGAGTACTGGCTAGTCCT | 6594 | AGGACTAGCCAGTACTCTC |
| 3034 | AGAGTACTGGCTAGTCCTG | 6595 | CAGGACTAGCCAGTACTCT |
| 3035 | GAGTACTGGCTAGTCCTGG | 6596 | CCAGGACTAGCCAGTACTC |
| 3036 | AGTACTGGCTAGTCCTGGT | 6597 | ACCAGGACTAGCCAGTACT |
| 3037 | GTACTGGCTAGTCCTGGTG | 6598 | CACCAGGACTAGCCAGTAC |
| 3038 | TACTGGCTAGTCCTGGTGT | 6599 | ACACCAGGACTAGCCAGTA |
| 3039 | ACTGGCTAGTCCTGGTGTG | 6600 | CACACCAGGACTAGCCAGT |
| 3040 | CTGGCTAGTCCTGGTGTGC | 6601 | GCACACCAGGACTAGCCAG |
| 3041 | TGGCTAGTCCTGGTGTGCC | 6602 | GGCACACCAGGACTAGCCA |
| 3042 | GGCTAGTCCTGGTGTGCCT | 6603 | AGGCACACCAGGACTAGCC |
| 3043 | GCTAGTCCTGGTGTGCCTG | 6604 | CAGGCACACCAGGACTAGC |
| 3044 | CTAGTCCTGGTGTGCCTGA | 6605 | TCAGGCACACCAGGACTAG |
| 3045 | TAGTCCTGGTGTGCCTGAC | 6606 | GTCAGGCACACCAGGACTA |
| 3046 | AGTCCTGGTGTGCCTGACA | 6607 | TGTCAGGCACACCAGGACT |
| 3047 | GTCCTGGTGTGCCTGACAT | 6608 | ATGTCAGGCACACCAGGAC |
| 3048 | TCCTGGTGTGCCTGACATG | 6609 | CATGTCAGGCACACCAGGA |
| 3049 | CCTGGTGTGCCTGACATGA | 6610 | TCATGTCAGGCACACCAGG |
| 3050 | CTGGTGTGCCTGACATGAG | 6611 | CTCATGTCAGGCACACCAG |
| 3051 | TGGTGTGCCTGACATGAGC | 6612 | GCTCATGTCAGGCACACCA |
| 3052 | GGTGTGCCTGACATGAGCA | 6613 | TGCTCATGTCAGGCACACC |
| 3053 | GTGTGCCTGACATGAGCAA | 6614 | TTGCTCATGTCAGGCACAC |
| 3054 | TGTGCCTGACATGAGCAAT | 6615 | ATTGCTCATGTCAGGCACA |
| 3055 | GTGCCTGACATGAGCAATA | 6616 | TATTGCTCATGTCAGGCAC |
| 3056 | TGCCTGACATGAGCAATAG | 6617 | CTATTGCTCATGTCAGGCA |
| 3057 | GCCTGACATGAGCAATAGT | 6618 | ACTATTGCTCATGTCAGGC |
| 3058 | CCTGACATGAGCAATAGTA | 6619 | TACTATTGCTCATGTCAGG |
| 3059 | CTGACATGAGCAATAGTAG | 6620 | CTACTATTGCTCATGTCAG |
| 3060 | TGACATGAGCAATAGTAGC | 6621 | GCTACTATTGCTCATGTCA |
| 3061 | GACATGAGCAATAGTAGCA | 6622 | TGCTACTATTGCTCATGTC |
| 3062 | ACATGAGCAATAGTAGCAC | 6623 | GTGCTACTATTGCTCATGT |
| 3063 | CATGAGCAATAGTAGCACG | 6624 | CGTGCTACTATTGCTCATG |
| 3064 | ATGAGCAATAGTAGCACGA | 6625 | TCGTGCTACTATTGCTCAT |
| 3065 | TGAGCAATAGTAGCACGAC | 6626 | GTCGTGCTACTATTGCTCA |
| 3066 | GAGCAATAGTAGCACGACT | 6627 | AGTCGTGCTACTATTGCTC |
| 3067 | AGCAATAGTAGCACGACTG | 6628 | CAGTCGTGCTACTATTGCT |
| 3068 | GCAATAGTAGCACGACTGA | 6629 | TCAGTCGTGCTACTATTGC |
| 3069 | CAATAGTAGCACGACTGAG | 6630 | CTCAGTCGTGCTACTATTG |
| 3070 | AATAGTAGCACGACTGAGG | 6631 | CCTCAGTCGTGCTACTATT |
| 3071 | ATAGTAGCACGACTGAGGG | 6632 | CCCTCAGTCGTGCTACTAT |
| 3072 | TAGTAGCACGACTGAGGGT | 6633 | ACCCTCAGTCGTGCTACTA |
| 3073 | AGTAGCACGACTGAGGGTT | 6634 | AACCCTCAGTCGTGCTACT |
| 3074 | GTAGCACGACTGAGGGTTG | 6635 | CAACCCTCAGTCGTGCTAC |
| 3075 | TAGCACGACTGAGGGTTGT | 6636 | ACAACCCTCAGTCGTGCTA |
| 3076 | AGCACGACTGAGGGTTGTA | 6637 | TACAACCCTCAGTCGTGCT |
| 3077 | GCACGACTGAGGGTTGTAT | 6638 | ATACAACCCTCAGTCGTGC |
| 3078 | CACGACTGAGGGTTGTATG | 6639 | CATACAACCCTCAGTCGTG |
| 3079 | ACGACTGAGGGTTGTATGG | 6640 | CCATACAACCCTCAGTCGT |
| 3080 | CGACTGAGGGTTGTATGGG | 6641 | CCCATACAACCCTCAGTCG |
| 3081 | GACTGAGGGTTGTATGGGA | 6642 | TCCCATACAACCCTCAGTC |
| 3082 | ACTGAGGGTTGTATGGGAC | 6643 | GTCCCATACAACCCTCAGT |
| 3083 | CTGAGGGTTGTATGGGACC | 6644 | GGTCCCATACAACCCTCAG |
| 3084 | TGAGGGTTGTATGGGACCT | 6645 | AGGTCCCATACAACCCTCA |
| 3085 | GAGGGTTGTATGGGACCTG | 6646 | CAGGTCCCATACAACCCTC |
| 3086 | AGGGTTGTATGGGACCTGT | 6647 | ACAGGTCCCATACAACCCT |
| 3087 | GGGTTGTATGGGACCTGTG | 6648 | CACAGGTCCCATACAACCC |
| 3088 | GGTTGTATGGGACCTGTGA | 6649 | TCACAGGTCCCATACAACC |
| 3089 | GTTGTATGGGACCTGTGAT | 6650 | ATCACAGGTCCCATACAAC |
| 3090 | TTGTATGGGACCTGTGATG | 6651 | CATCACAGGTCCCATACAA |
| 3091 | TGTATGGGACCTGTGATGA | 6652 | TCATCACAGGTCCCATACA |
| 3092 | GTATGGGACCTGTGATGAG | 6653 | CTCATCACAGGTCCCATAC |
| 3093 | TATGGGACCTGTGATGAGC | 6654 | GCTCATCACAGGTCCCATA |
| 3094 | ATGGGACCTGTGATGAGCG | 6655 | CGCTCATCACAGGTCCCAT |
| 3095 | TGGGACCTGTGATGAGCGG | 6656 | CCGCTCATCACAGGTCCCA |
| 3096 | GGGACCTGTGATGAGCGGC | 6657 | GCCGCTCATCACAGGTCCC |
| 3097 | GGACCTGTGATGAGCGGCA | 6658 | TGCCGCTCATCACAGGTCC |
| 3098 | GACCTGTGATGAGCGGCAA | 6659 | TTGCCGCTCATCACAGGTC |
| 3099 | ACCTGTGATGAGCGGCAAT | 6660 | ATTGCCGCTCATCACAGGT |
| 3100 | CCTGTGATGAGCGGCAATA | 6661 | TATTGCCGCTCATCACAGG |
| 3101 | CTGTGATGAGCGGCAATAT | 6662 | ATATTGCCGCTCATCACAG |
| 3102 | TGTGATGAGCGGCAATATT | 6663 | AATATTGCCGCTCATCACA |
| 3103 | GTGATGAGCGGCAATATTT | 6664 | AAATATTGCCGCTCATCAC |
| 3104 | TGATGAGCGGCAATATTTT | 6665 | AAAATATTGCCGCTCATCA |
| 3105 | GATGAGCGGCAATATTTTA | 6666 | TAAAATATTGCCGCTCATC |
| 3106 | ATGAGCGGCAATATTTTAG | 6667 | CTAAAATATTGCCGCTCAT |
| 3107 | TGAGCGGCAATATTTTAGT | 6668 | ACTAAAATATTGCCGCTCA |
| 3108 | GAGCGGCAATATTTTAGTA | 6669 | TACTAAAATATTGCCGCTC |
| 3109 | AGCGGCAATATTTTAGTAG | 6670 | CTACTAAAATATTGCCGCT |
| 3110 | GCGGCAATATTTTAGTAGG | 6671 | CCTACTAAAATATTGCCGC |
| 3111 | CGGCAATATTTTAGTAGGG | 6672 | CCCTACTAAAATATTGCCG |
| 3112 | GGCAATATTTTAGTAGGGC | 6673 | GCCCTACTAAAATATTGCC |
| 3113 | GCAATATTTTAGTAGGGCC | 6674 | GGCCCTACTAAAATATTGC |
| 3114 | CAATATTTTAGTAGGGCCA | 6675 | TGGCCCTACTAAAATATTG |
| 3115 | AATATTTTAGTAGGGCCAG | 6676 | CTGGCCCTACTAAAATATT |
| 3116 | ATATTTTAGTAGGGCCAGA | 6677 | TCTGGCCCTACTAAAATAT |
| 3117 | TATTTTAGTAGGGCCAGAA | 6678 | TTCTGGCCCTACTAAAATA |
| 3118 | ATTTTAGTAGGGCCAGAAA | 6679 | TTTCTGGCCCTACTAAAAT |
| 3119 | TTTTAGTAGGGCCAGAAAT | 6680 | ATTTCTGGCCCTACTAAAA |
| 3120 | TTTAGTAGGGCCAGAAATT | 6681 | AATTTCTGGCCCTACTAAA |
| 3121 | TTAGTAGGGCCAGAAATTC | 6682 | GAATTTCTGGCCCTACTAA |
| 3122 | TAGTAGGGCCAGAAATTCA | 6683 | TGAATTTCTGGCCCTACTA |
| 3123 | AGTAGGGCCAGAAATTCAA | 6684 | TTGAATTTCTGGCCCTACT |
| 3124 | GTAGGGCCAGAAATTCAAG | 6685 | CTTGAATTTCTGGCCCTAC |
| 3125 | TAGGGCCAGAAATTCAAGT | 6686 | ACTTGAATTTCTGGCCCTA |
| 3126 | AGGGCCAGAAATTCAAGTG | 6687 | CACTTGAATTTCTGGCCCT |
| 3127 | GGGCCAGAAATTCAAGTGA | 6688 | TCACTTGAATTTCTGGCCC |
| 3128 | GGCCAGAAATTCAAGTGAT | 6689 | ATCACTTGAATTTCTGGCC |
| 3129 | GCCAGAAATTCAAGTGATG | 6690 | CATCACTTGAATTTCTGGC |
| 3130 | CCAGAAATTCAAGTGATGC | 6691 | GCATCACTTGAATTTCTGG |
| 3131 | CAGAAATTCAAGTGATGCA | 6692 | TGCATCACTTGAATTTCTG |
| 3132 | AGAAATTCAAGTGATGCAA | 6693 | TTGCATCACTTGAATTTCT |
| 3133 | GAAATTCAAGTGATGCAAA | 6694 | TTTGCATCACTTGAATTTC |
| 3134 | AAATTCAAGTGATGCAAAT | 6695 | ATTTGCATCACTTGAATTT |
| 3135 | AATTCAAGTGATGCAAATG | 6696 | CATTTGCATCACTTGAATT |
| 3136 | ATTCAAGTGATGCAAATGA | 6697 | TCATTTGCATCACTTGAAT |
| 3137 | TTCAAGTGATGCAAATGAT | 6698 | ATCATTTGCATCACTTGAA |
| 3138 | TCAAGTGATGCAAATGATG | 6699 | CATCATTTGCATCACTTGA |
| 3139 | CAAGTGATGCAAATGATGA | 6700 | TCATCATTTGCATCACTTG |
| 3140 | AAGTGATGCAAATGATGAG | 6701 | CTCATCATTTGCATCACTT |
| 3141 | AGTGATGCAAATGATGAGT | 6702 | ACTCATCATTTGCATCACT |
| 3142 | GTGATGCAAATGATGAGTC | 6703 | GACTCATCATTTGCATCAC |
| 3143 | TGATGCAAATGATGAGTCC | 6704 | GGACTCATCATTTGCATCA |
| 3144 | GATGCAAATGATGAGTCCA | 6705 | TGGACTCATCATTTGCATC |
| 3145 | ATGCAAATGATGAGTCCAG | 6706 | CTGGACTCATCATTTGCAT |
| 3146 | TGCAAATGATGAGTCCAGA | 6707 | TCTGGACTCATCATTTGCA |
| 3147 | GCAAATGATGAGTCCAGAC | 6708 | GTCTGGACTCATCATTTGC |
| 3148 | CAAATGATGAGTCCAGACC | 6709 | GGTCTGGACTCATCATTTG |
| 3149 | AAATGATGAGTCCAGACCT | 6710 | AGGTCTGGACTCATCATTT |
| 3150 | AATGATGAGTCCAGACCTT | 6711 | AAGGTCTGGACTCATCATT |
| 3151 | ATGATGAGTCCAGACCTTC | 6712 | GAAGGTCTGGACTCATCAT |
| 3152 | TGATGAGTCCAGACCTTCC | 6713 | GGAAGGTCTGGACTCATCA |
| 3153 | GATGAGTCCAGACCTTCCC | 6714 | GGGAAGGTCTGGACTCATC |
| 3154 | ATGAGTCCAGACCTTCCCA | 6715 | TGGGAAGGTCTGGACTCAT |
| 3155 | TGAGTCCAGACCTTCCCAT | 6716 | ATGGGAAGGTCTGGACTCA |
| 3156 | GAGTCCAGACCTTCCCATA | 6717 | TATGGGAAGGTCTGGACTC |
| 3157 | AGTCCAGACCTTCCCATAG | 6718 | CTATGGGAAGGTCTGGACT |
| 3158 | GTCCAGACCTTCCCATAGG | 6719 | CCTATGGGAAGGTCTGGAC |
| 3159 | TCCAGACCTTCCCATAGGC | 6720 | GCCTATGGGAAGGTCTGGA |
| 3160 | CCAGACCTTCCCATAGGCC | 6721 | GGCCTATGGGAAGGTCTGG |
| 3161 | CAGACCTTCCCATAGGCCA | 6722 | TGGCCTATGGGAAGGTCTG |
| 3162 | AGACCTTCCCATAGGCCAA | 6723 | TTGGCCTATGGGAAGGTCT |
| 3163 | GACCTTCCCATAGGCCAAA | 6724 | TTTGGCCTATGGGAAGGTC |
| 3164 | ACCTTCCCATAGGCCAAAC | 6725 | GTTTGGCCTATGGGAAGGT |
| 3165 | CCTTCCCATAGGCCAAACC | 6726 | GGTTTGGCCTATGGGAAGG |
| 3166 | CTTCCCATAGGCCAAACCG | 6727 | CGGTTTGGCCTATGGGAAG |
| 3167 | TTCCCATAGGCCAAACCGT | 6728 | ACGGTTTGGCCTATGGGAA |
| 3168 | TCCCATAGGCCAAACCGTT | 6729 | AACGGTTTGGCCTATGGGA |
| 3169 | CCCATAGGCCAAACCGTTG | 6730 | CAACGGTTTGGCCTATGGG |
| 3170 | CCATAGGCCAAACCGTTGG | 6731 | CCAACGGTTTGGCCTATGG |
| 3171 | CATAGGCCAAACCGTTGGC | 6732 | GCCAACGGTTTGGCCTATG |
| 3172 | ATAGGCCAAACCGTTGGCT | 6733 | AGCCAACGGTTTGGCCTAT |
| 3173 | TAGGCCAAACCGTTGGCTC | 6734 | GAGCCAACGGTTTGGCCTA |
| 3174 | AGGCCAAACCGTTGGCTCC | 6735 | GGAGCCAACGGTTTGGCCT |
| 3175 | GGCCAAACCGTTGGCTCCA | 6736 | TGGAGCCAACGGTTTGGCC |
| 3176 | GCCAAACCGTTGGCTCCAC | 6737 | GTGGAGCCAACGGTTTGGC |
| 3177 | CCAAACCGTTGGCTCCACA | 6738 | TGTGGAGCCAACGGTTTGG |
| 3178 | CAAACCGTTGGCTCCACAT | 6739 | ATGTGGAGCCAACGGTTTG |
| 3179 | AAACCGTTGGCTCCACATC | 6740 | GATGTGGAGCCAACGGTTT |
| 3180 | AACCGTTGGCTCCACATCC | 6741 | GGATGTGGAGCCAACGGTT |
| 3181 | ACCGTTGGCTCCACATCCC | 6742 | GGGATGTGGAGCCAACGGT |
| 3182 | CCGTTGGCTCCACATCCCC | 6743 | GGGGATGTGGAGCCAACGG |
| 3183 | CGTTGGCTCCACATCCCCC | 6744 | GGGGGATGTGGAGCCAACG |
| 3184 | GTTGGCTCCACATCCCCCA | 6745 | TGGGGGATGTGGAGCCAAC |
| 3185 | TTGGCTCCACATCCCCCAT | 6746 | ATGGGGGATGTGGAGCCAA |
| 3186 | TGGCTCCACATCCCCCATG | 6747 | CATGGGGGATGTGGAGCCA |
| 3187 | GGCTCCACATCCCCCATGA | 6748 | TCATGGGGGATGTGGAGCC |
| 3188 | GCTCCACATCCCCCATGAC | 6749 | GTCATGGGGGATGTGGAGC |
| 3189 | CTCCACATCCCCCATGACA | 6750 | TGTCATGGGGGATGTGGAG |
| 3190 | TCCACATCCCCCATGACAT | 6751 | ATGTCATGGGGGATGTGGA |
| 3191 | CCACATCCCCCATGACATC | 6752 | GATGTCATGGGGGATGTGG |
| 3192 | CACATCCCCCATGACATCT | 6753 | AGATGTCATGGGGGATGTG |
| 3193 | ACATCCCCCATGACATCTC | 6754 | GAGATGTCATGGGGGATGT |
| 3194 | CATCCCCCATGACATCTCG | 6755 | CGAGATGTCATGGGGGATG |
| 3195 | ATCCCCCATGACATCTCGA | 6756 | TCGAGATGTCATGGGGGAT |
| 3196 | TCCCCCATGACATCTCGAC | 6757 | GTCGAGATGTCATGGGGGA |
| 3197 | CCCCCATGACATCTCGACA | 6758 | TGTCGAGATGTCATGGGGG |
| 3198 | CCCCATGACATCTCGACAC | 6759 | GTGTCGAGATGTCATGGGG |
| 3199 | CCCATGACATCTCGACACA | 6760 | TGTGTCGAGATGTCATGGG |
| 3200 | CCATGACATCTCGACACAG | 6761 | CTGTGTCGAGATGTCATGG |
| 3201 | CATGACATCTCGACACAGA | 6762 | TCTGTGTCGAGATGTCATG |
| 3202 | ATGACATCTCGACACAGAG | 6763 | CTCTGTGTCGAGATGTCAT |
| 3203 | TGACATCTCGACACAGAGT | 6764 | ACTCTGTGTCGAGATGTCA |
| 3204 | GACATCTCGACACAGAGTA | 6765 | TACTCTGTGTCGAGATGTC |
| 3205 | ACATCTCGACACAGAGTAA | 6766 | TTACTCTGTGTCGAGATGT |
| 3206 | CATCTCGACACAGAGTAAC | 6767 | GTTACTCTGTGTCGAGATG |
| 3207 | ATCTCGACACAGAGTAACA | 6768 | TGTTACTCTGTGTCGAGAT |
| 3208 | TCTCGACACAGAGTAACAC | 6769 | GTGTTACTCTGTGTCGAGA |
| 3209 | CTCGACACAGAGTAACACG | 6770 | CGTGTTACTCTGTGTCGAG |
| 3210 | TCGACACAGAGTAACACGA | 6771 | TCGTGTTACTCTGTGTCGA |
| 3211 | CGACACAGAGTAACACGAT | 6772 | ATCGTGTTACTCTGTGTCG |
| 3212 | GACACAGAGTAACACGATA | 6773 | TATCGTGTTACTCTGTGTC |
| 3213 | ACACAGAGTAACACGATAC | 6774 | GTATCGTGTTACTCTGTGT |
| 3214 | CACAGAGTAACACGATACA | 6775 | TGTATCGTGTTACTCTGTG |
| 3215 | ACAGAGTAACACGATACAG | 6776 | CTGTATCGTGTTACTCTGT |
| 3216 | CAGAGTAACACGATACAGT | 6777 | ACTGTATCGTGTTACTCTG |
| 3217 | AGAGTAACACGATACAGTA | 6778 | TACTGTATCGTGTTACTCT |
| 3218 | GAGTAACACGATACAGTAA | 6779 | TTACTGTATCGTGTTACTC |
| 3219 | AGTAACACGATACAGTAAC | 6780 | GTTACTGTATCGTGTTACT |
| 3220 | GTAACACGATACAGTAACA | 6781 | TGTTACTGTATCGTGTTAC |
| 3221 | TAACACGATACAGTAACAT | 6782 | ATGTTACTGTATCGTGTTA |
| 3222 | AACACGATACAGTAACATA | 6783 | TATGTTACTGTATCGTGTT |
| 3223 | ACACGATACAGTAACATAC | 6784 | GTATGTTACTGTATCGTGT |
| 3224 | CACGATACAGTAACATACA | 6785 | TGTATGTTACTGTATCGTG |
| 3225 | ACGATACAGTAACATACAT | 6786 | ATGTATGTTACTGTATCGT |
| 3226 | CGATACAGTAACATACATT | 6787 | AATGTATGTTACTGTATCG |
| 3227 | GATACAGTAACATACATTA | 6788 | TAATGTATGTTACTGTATC |
| 3228 | ATACAGTAACATACATTAC | 6789 | GTAATGTATGTTACTGTAT |
| 3229 | TACAGTAACATACATTACA | 6790 | TGTAATGTATGTTACTGTA |
| 3230 | ACAGTAACATACATTACAC | 6791 | GTGTAATGTATGTTACTGT |
| 3231 | CAGTAACATACATTACACC | 6792 | GGTGTAATGTATGTTACTG |
| 3232 | AGTAACATACATTACACCC | 6793 | GGGTGTAATGTATGTTACT |
| 3233 | GTAACATACATTACACCCA | 6794 | TGGGTGTAATGTATGTTAC |
| 3234 | TAACATACATTACACCCAA | 6795 | TTGGGTGTAATGTATGTTA |
| 3235 | AACATACATTACACCCAAC | 6796 | GTTGGGTGTAATGTATGTT |
| 3236 | ACATACATTACACCCAACA | 6797 | TGTTGGGTGTAATGTATGT |
| 3237 | CATACATTACACCCAACAG | 6798 | CTGTTGGGTGTAATGTATG |
| 3238 | ATACATTACACCCAACAGT | 6799 | ACTGTTGGGTGTAATGTAT |
| 3239 | TACATTACACCCAACAGTA | 6800 | TACTGTTGGGTGTAATGTA |
| 3240 | ACATTACACCCAACAGTAA | 6801 | TTACTGTTGGGTGTAATGT |
| 3241 | CATTACACCCAACAGTAAG | 6802 | CTTACTGTTGGGTGTAATG |
| 3242 | ATTACACCCAACAGTAAGT | 6803 | ACTTACTGTTGGGTGTAAT |
| 3243 | TTACACCCAACAGTAAGTG | 6804 | CACTTACTGTTGGGTGTAA |
| 3244 | TACACCCAACAGTAAGTGC | 6805 | GCACTTACTGTTGGGTGTA |
| 3245 | ACACCCAACAGTAAGTGCT | 6806 | AGCACTTACTGTTGGGTGT |
| 3246 | CACCCAACAGTAAGTGCTT | 6807 | AAGCACTTACTGTTGGGTG |
| 3247 | ACCCAACAGTAAGTGCTTT | 6808 | AAAGCACTTACTGTTGGGT |
| 3248 | CCCAACAGTAAGTGCTTTA | 6809 | TAAAGCACTTACTGTTGGG |
| 3249 | CCAACAGTAAGTGCTTTAT | 6810 | ATAAAGCACTTACTGTTGG |
| 3250 | CAACAGTAAGTGCTTTATG | 6811 | CATAAAGCACTTACTGTTG |
| 3251 | AACAGTAAGTGCTTTATGG | 6812 | CCATAAAGCACTTACTGTT |
| 3252 | ACAGTAAGTGCTTTATGGT | 6813 | ACCATAAAGCACTTACTGT |
| 3253 | CAGTAAGTGCTTTATGGTC | 6814 | GACCATAAAGCACTTACTG |
| 3254 | AGTAAGTGCTTTATGGTCA | 6815 | TGACCATAAAGCACTTACT |
| 3255 | GTAAGTGCTTTATGGTCAG | 6816 | CTGACCATAAAGCACTTAC |
| 3256 | TAAGTGCTTTATGGTCAGT | 6817 | ACTGACCATAAAGCACTTA |
| 3257 | AAGTGCTTTATGGTCAGTA | 6818 | TACTGACCATAAAGCACTT |
| 3258 | AGTGCTTTATGGTCAGTAT | 6819 | ATACTGACCATAAAGCACT |
| 3259 | GTGCTTTATGGTCAGTATT | 6820 | AATACTGACCATAAAGCAC |
| 3260 | TGCTTTATGGTCAGTATTC | 6821 | GAATACTGACCATAAAGCA |
| 3261 | GCTTTATGGTCAGTATTCT | 6822 | AGAATACTGACCATAAAGC |
| 3262 | CTTTATGGTCAGTATTCTA | 6823 | TAGAATACTGACCATAAAG |
| 3263 | TTTATGGTCAGTATTCTAT | 6824 | ATAGAATACTGACCATAAA |
| 3264 | TTATGGTCAGTATTCTATG | 6825 | CATAGAATACTGACCATAA |
| 3265 | TATGGTCAGTATTCTATGT | 6826 | ACATAGAATACTGACCATA |
| 3266 | ATGGTCAGTATTCTATGTG | 6827 | CACATAGAATACTGACCAT |
| 3267 | TGGTCAGTATTCTATGTGG | 6828 | CCACATAGAATACTGACCA |
| 3268 | GGTCAGTATTCTATGTGGA | 6829 | TCCACATAGAATACTGACC |
| 3269 | GTCAGTATTCTATGTGGAG | 6830 | CTCCACATAGAATACTGAC |
| 3270 | TCAGTATTCTATGTGGAGA | 6831 | TCTCCACATAGAATACTGA |
| 3271 | CAGTATTCTATGTGGAGAC | 6832 | GTCTCCACATAGAATACTG |
| 3272 | AGTATTCTATGTGGAGACC | 6833 | GGTCTCCACATAGAATACT |
| 3273 | GTATTCTATGTGGAGACCT | 6834 | AGGTCTCCACATAGAATAC |
| 3274 | TATTCTATGTGGAGACCTT | 6835 | AAGGTCTCCACATAGAATA |
| 3275 | ATTCTATGTGGAGACCTTG | 6836 | CAAGGTCTCCACATAGAAT |
| 3276 | TTCTATGTGGAGACCTTGC | 6837 | GCAAGGTCTCCACATAGAA |
| 3277 | TCTATGTGGAGACCTTGCA | 6838 | TGCAAGGTCTCCACATAGA |
| 3278 | CTATGTGGAGACCTTGCAC | 6839 | GTGCAAGGTCTCCACATAG |
| 3279 | TATGTGGAGACCTTGCACC | 6840 | GGTGCAAGGTCTCCACATA |
| 3280 | ATGTGGAGACCTTGCACCT | 6841 | AGGTGCAAGGTCTCCACAT |
| 3281 | TGTGGAGACCTTGCACCTT | 6842 | AAGGTGCAAGGTCTCCACA |
| 3282 | GTGGAGACCTTGCACCTTG | 6843 | CAAGGTGCAAGGTCTCCAC |
| 3283 | TGGAGACCTTGCACCTTGT | 6844 | ACAAGGTGCAAGGTCTCCA |
| 3284 | GGAGACCTTGCACCTTGTA | 6845 | TACAAGGTGCAAGGTCTCC |
| 3285 | GAGACCTTGCACCTTGTAA | 6846 | TTACAAGGTGCAAGGTCTC |
| 3286 | AGACCTTGCACCTTGTAAT | 6847 | ATTACAAGGTGCAAGGTCT |
| 3287 | GACCTTGCACCTTGTAATC | 6848 | GATTACAAGGTGCAAGGTC |
| 3288 | ACCTTGCACCTTGTAATCA | 6849 | TGATTACAAGGTGCAAGGT |
| 3289 | CCTTGCACCTTGTAATCAT | 6850 | ATGATTACAAGGTGCAAGG |
| 3290 | CTTGCACCTTGTAATCATC | 6851 | GATGATTACAAGGTGCAAG |
| 3291 | TTGCACCTTGTAATCATCA | 6852 | TGATGATTACAAGGTGCAA |
| 3292 | TGCACCTTGTAATCATCAA | 6853 | TTGATGATTACAAGGTGCA |
| 3293 | GCACCTTGTAATCATCAAT | 6854 | ATTGATGATTACAAGGTGC |
| 3294 | CACCTTGTAATCATCAATA | 6855 | TATTGATGATTACAAGGTG |
| 3295 | ACCTTGTAATCATCAATAC | 6856 | GTATTGATGATTACAAGGT |
| 3296 | CCTTGTAATCATCAATACA | 6857 | TGTATTGATGATTACAAGG |
| 3297 | CTTGTAATCATCAATACAT | 6858 | ATGTATTGATGATTACAAG |
| 3298 | TTGTAATCATCAATACATC | 6859 | GATGTATTGATGATTACAA |
| 3299 | TGTAATCATCAATACATCC | 6860 | GGATGTATTGATGATTACA |
| 3300 | GTAATCATCAATACATCCA | 6861 | TGGATGTATTGATGATTAC |
| 3301 | TAATCATCAATACATCCAC | 6862 | GTGGATGTATTGATGATTA |
| 3302 | AATCATCAATACATCCACC | 6863 | GGTGGATGTATTGATGATT |
| 3303 | ATCATCAATACATCCACCA | 6864 | TGGTGGATGTATTGATGAT |
| 3304 | TCATCAATACATCCACCAA | 6865 | TTGGTGGATGTATTGATGA |
| 3305 | CATCAATACATCCACCAAA | 6866 | TTTGGTGGATGTATTGATG |
| 3306 | ATCAATACATCCACCAAAA | 6867 | TTTTGGTGGATGTATTGAT |
| 3307 | TCAATACATCCACCAAAAA | 6868 | TTTTTGGTGGATGTATTGA |
| 3308 | CAATACATCCACCAAAAAT | 6869 | ATTTTTGGTGGATGTATTG |
| 3309 | AATACATCCACCAAAAATA | 6870 | TATTTTTGGTGGATGTATT |
| 3310 | ATACATCCACCAAAAATAT | 6871 | ATATTTTTGGTGGATGTAT |
| 3311 | TACATCCACCAAAAATATA | 6872 | TATATTTTTGGTGGATGTA |
| 3312 | ACATCCACCAAAAATATAT | 6873 | ATATATTTTTGGTGGATGT |
| 3313 | CATCCACCAAAAATATATA | 6874 | TATATATTTTTGGTGGATG |
| 3314 | ATCCACCAAAAATATATAA | 6875 | TTATATATTTTTGGTGGAT |
| 3315 | TCCACCAAAAATATATAAT | 6876 | ATTATATATTTTTGGTGGA |
| 3316 | CCACCAAAAATATATAATG | 6877 | CATTATATATTTTTGGTGG |
| 3317 | CACCAAAAATATATAATGT | 6878 | ACATTATATATTTTTGGTG |
| 3318 | ACCAAAAATATATAATGTA | 6879 | TACATTATATATTTTTGGT |
| 3319 | CCAAAAATATATAATGTAC | 6880 | GTACATTATATATTTTTGG |
| 3320 | CAAAAATATATAATGTACC | 6881 | GGTACATTATATATTTTTG |
| 3321 | AAAAATATATAATGTACCA | 6882 | TGGTACATTATATATTTTT |
| 3322 | AAAATATATAATGTACCAT | 6883 | ATGGTACATTATATATTTT |
| 3323 | AAATATATAATGTACCATA | 6884 | TATGGTACATTATATATTT |
| 3324 | AATATATAATGTACCATAT | 6885 | ATATGGTACATTATATATT |
| 3325 | ATATATAATGTACCATATA | 6886 | TATATGGTACATTATATAT |
| 3326 | TATATAATGTACCATATAT | 6887 | ATATATGGTACATTATATA |
| 3327 | ATATAATGTACCATATATA | 6888 | TATATATGGTACATTATAT |
| 3328 | TATAATGTACCATATATAT | 6889 | ATATATATGGTACATTATA |
| 3329 | ATAATGTACCATATATATT | 6890 | AATATATATGGTACATTAT |
| 3330 | TAATGTACCATATATATTA | 6891 | TAATATATATGGTACATTA |
| 3331 | AATGTACCATATATATTAA | 6892 | TTAATATATATGGTACATT |
| 3332 | ATGTACCATATATATTAAT | 6893 | ATTAATATATATGGTACAT |
| 3333 | TGTACCATATATATTAATA | 6894 | TATTAATATATATGGTACA |
| 3334 | GTACCATATATATTAATAG | 6895 | CTATTAATATATATGGTAC |
| 3335 | TACCATATATATTAATAGT | 6896 | ACTATTAATATATATGGTA |
| 3336 | ACCATATATATTAATAGTC | 6897 | GACTATTAATATATATGGT |
| 3337 | CCATATATATTAATAGTCA | 6898 | TGACTATTAATATATATGG |
| 3338 | CATATATATTAATAGTCAA | 6899 | TTGACTATTAATATATATG |
| 3339 | ATATATATTAATAGTCAAC | 6900 | GTTGACTATTAATATATAT |
| 3340 | TATATATTAATAGTCAACA | 6901 | TGTTGACTATTAATATATA |
| 3341 | ATATATTAATAGTCAACAA | 6902 | TTGTTGACTATTAATATAT |
| 3342 | TATATTAATAGTCAACAAA | 6903 | TTTGTTGACTATTAATATA |
| 3343 | ATATTAATAGTCAACAAAT | 6904 | ATTTGTTGACTATTAATAT |
| 3344 | TATTAATAGTCAACAAATA | 6905 | TATTTGTTGACTATTAATA |
| 3345 | ATTAATAGTCAACAAATAC | 6906 | GTATTTGTTGACTATTAAT |
| 3346 | TTAATAGTCAACAAATACT | 6907 | AGTATTTGTTGACTATTAA |
| 3347 | TAATAGTCAACAAATACTC | 6908 | GAGTATTTGTTGACTATTA |
| 3348 | AATAGTCAACAAATACTCA | 6909 | TGAGTATTTGTTGACTATT |
| 3349 | ATAGTCAACAAATACTCAG | 6910 | CTGAGTATTTGTTGACTAT |
| 3350 | TAGTCAACAAATACTCAGA | 6911 | TCTGAGTATTTGTTGACTA |
| 3351 | AGTCAACAAATACTCAGAT | 6912 | ATCTGAGTATTTGTTGACT |
| 3352 | GTCAACAAATACTCAGATA | 6913 | TATCTGAGTATTTGTTGAC |
| 3353 | TCAACAAATACTCAGATAT | 6914 | ATATCTGAGTATTTGTTGA |
| 3354 | CAACAAATACTCAGATATT | 6915 | AATATCTGAGTATTTGTTG |
| 3355 | AACAAATACTCAGATATTC | 6916 | GAATATCTGAGTATTTGTT |
| 3356 | ACAAATACTCAGATATTCT | 6917 | AGAATATCTGAGTATTTGT |
| 3357 | CAAATACTCAGATATTCTA | 6918 | TAGAATATCTGAGTATTTG |
| 3358 | AAATACTCAGATATTCTAA | 6919 | TTAGAATATCTGAGTATTT |
| 3359 | AATACTCAGATATTCTAAG | 6920 | CTTAGAATATCTGAGTATT |
| 3360 | ATACTCAGATATTCTAAGG | 6921 | CCTTAGAATATCTGAGTAT |
| 3361 | TACTCAGATATTCTAAGGT | 6922 | ACCTTAGAATATCTGAGTA |
| 3362 | ACTCAGATATTCTAAGGTC | 6923 | GACCTTAGAATATCTGAGT |
| 3363 | CTCAGATATTCTAAGGTCA | 6924 | TGACCTTAGAATATCTGAG |
| 3364 | TCAGATATTCTAAGGTCAA | 6925 | TTGACCTTAGAATATCTGA |
| 3365 | CAGATATTCTAAGGTCAAT | 6926 | ATTGACCTTAGAATATCTG |
| 3366 | AGATATTCTAAGGTCAATG | 6927 | CATTGACCTTAGAATATCT |
| 3367 | GATATTCTAAGGTCAATGC | 6928 | GCATTGACCTTAGAATATC |
| 3368 | ATATTCTAAGGTCAATGCC | 6929 | GGCATTGACCTTAGAATAT |
| 3369 | TATTCTAAGGTCAATGCCA | 6930 | TGGCATTGACCTTAGAATA |
| 3370 | ATTCTAAGGTCAATGCCAT | 6931 | ATGGCATTGACCTTAGAAT |
| 3371 | TTCTAAGGTCAATGCCATT | 6932 | AATGGCATTGACCTTAGAA |
| 3372 | TCTAAGGTCAATGCCATTA | 6933 | TAATGGCATTGACCTTAGA |
| 3373 | CTAAGGTCAATGCCATTAT | 6934 | ATAATGGCATTGACCTTAG |
| 3374 | TAAGGTCAATGCCATTATT | 6935 | AATAATGGCATTGACCTTA |
| 3375 | AAGGTCAATGCCATTATTT | 6936 | AAATAATGGCATTGACCTT |
| 3376 | AGGTCAATGCCATTATTTG | 6937 | CAAATAATGGCATTGACCT |
| 3377 | GGTCAATGCCATTATTTGA | 6938 | TCAAATAATGGCATTGACC |
| 3378 | GTCAATGCCATTATTTGAT | 6939 | ATCAAATAATGGCATTGAC |
| 3379 | TCAATGCCATTATTTGATT | 6940 | AATCAAATAATGGCATTGA |
| 3380 | CAATGCCATTATTTGATTA | 6941 | TAATCAAATAATGGCATTG |
| 3381 | AATGCCATTATTTGATTAT | 6942 | ATAATCAAATAATGGCATT |
| 3382 | ATGCCATTATTTGATTATA | 6943 | TATAATCAAATAATGGCAT |
| 3383 | TGCCATTATTTGATTATAC | 6944 | GTATAATCAAATAATGGCA |
| 3384 | GCCATTATTTGATTATACC | 6945 | GGTATAATCAAATAATGGC |
| 3385 | CCATTATTTGATTATACCA | 6946 | TGGTATAATCAAATAATGG |
| 3386 | CATTATTTGATTATACCAT | 6947 | ATGGTATAATCAAATAATG |
| 3387 | ATTATTTGATTATACCATT | 6948 | AATGGTATAATCAAATAAT |
| 3388 | TTATTTGATTATACCATTT | 6949 | AAATGGTATAATCAAATAA |
| 3389 | TATTTGATTATACCATTTT | 6950 | AAAATGGTATAATCAAATA |
| 3390 | ATTTGATTATACCATTTTG | 6951 | CAAAATGGTATAATCAAAT |
| 3391 | TTTGATTATACCATTTTGA | 6952 | TCAAAATGGTATAATCAAA |
| 3392 | TTGATTATACCATTTTGAG | 6953 | CTCAAAATGGTATAATCAA |
| 3393 | TGATTATACCATTTTGAGG | 6954 | CCTCAAAATGGTATAATCA |
| 3394 | GATTATACCATTTTGAGGG | 6955 | CCCTCAAAATGGTATAATC |
| 3395 | ATTATACCATTTTGAGGGT | 6956 | ACCCTCAAAATGGTATAAT |
| 3396 | TTATACCATTTTGAGGGTG | 6957 | CACCCTCAAAATGGTATAA |
| 3397 | TATACCATTTTGAGGGTGA | 6958 | TCACCCTCAAAATGGTATA |
| 3398 | ATACCATTTTGAGGGTGAA | 6959 | TTCACCCTCAAAATGGTAT |
| 3399 | TACCATTTTGAGGGTGAAT | 6960 | ATTCACCCTCAAAATGGTA |
| 3400 | ACCATTTTGAGGGTGAATA | 6961 | TATTCACCCTCAAAATGGT |
| 3401 | CCATTTTGAGGGTGAATAT | 6962 | ATATTCACCCTCAAAATGG |
| 3402 | CATTTTGAGGGTGAATATG | 6963 | CATATTCACCCTCAAAATG |
| 3403 | ATTTTGAGGGTGAATATGG | 6964 | CCATATTCACCCTCAAAAT |
| 3404 | TTTTGAGGGTGAATATGGC | 6965 | GCCATATTCACCCTCAAAA |
| 3405 | TTTGAGGGTGAATATGGCT | 6966 | AGCCATATTCACCCTCAAA |
| 3406 | TTGAGGGTGAATATGGCTA | 6967 | TAGCCATATTCACCCTCAA |
| 3407 | TGAGGGTGAATATGGCTAG | 6968 | CTAGCCATATTCACCCTCA |
| 3408 | GAGGGTGAATATGGCTAGG | 6969 | CCTAGCCATATTCACCCTC |
| 3409 | AGGGTGAATATGGCTAGGC | 6970 | GCCTAGCCATATTCACCCT |
| 3410 | GGGTGAATATGGCTAGGCA | 6971 | TGCCTAGCCATATTCACCC |
| 3411 | GGTGAATATGGCTAGGCAC | 6972 | GTGCCTAGCCATATTCACC |
| 3412 | GTGAATATGGCTAGGCACT | 6973 | AGTGCCTAGCCATATTCAC |
| 3413 | TGAATATGGCTAGGCACTT | 6974 | AAGTGCCTAGCCATATTCA |
| 3414 | GAATATGGCTAGGCACTTT | 6975 | AAAGTGCCTAGCCATATTC |
| 3415 | AATATGGCTAGGCACTTTA | 6976 | TAAAGTGCCTAGCCATATT |
| 3416 | ATATGGCTAGGCACTTTAG | 6977 | CTAAAGTGCCTAGCCATAT |
| 3417 | TATGGCTAGGCACTTTAGA | 6978 | TCTAAAGTGCCTAGCCATA |
| 3418 | ATGGCTAGGCACTTTAGAT | 6979 | ATCTAAAGTGCCTAGCCAT |
| 3419 | TGGCTAGGCACTTTAGATA | 6980 | TATCTAAAGTGCCTAGCCA |
| 3420 | GGCTAGGCACTTTAGATAA | 6981 | TTATCTAAAGTGCCTAGCC |
| 3421 | GCTAGGCACTTTAGATAAG | 6982 | CTTATCTAAAGTGCCTAGC |
| 3422 | CTAGGCACTTTAGATAAGC | 6983 | GCTTATCTAAAGTGCCTAG |
| 3423 | TAGGCACTTTAGATAAGCC | 6984 | GGCTTATCTAAAGTGCCTA |
| 3424 | AGGCACTTTAGATAAGCCT | 6985 | AGGCTTATCTAAAGTGCCT |
| 3425 | GGCACTTTAGATAAGCCTT | 6986 | AAGGCTTATCTAAAGTGCC |
| 3426 | GCACTTTAGATAAGCCTTT | 6987 | AAAGGCTTATCTAAAGTGC |
| 3427 | CACTTTAGATAAGCCTTTT | 6988 | AAAAGGCTTATCTAAAGTG |
| 3428 | ACTTTAGATAAGCCTTTTT | 6989 | AAAAAGGCTTATCTAAAGT |
| 3429 | CTTTAGATAAGCCTTTTTA | 6990 | TAAAAAGGCTTATCTAAAG |
| 3430 | TTTAGATAAGCCTTTTTAA | 6991 | TTAAAAAGGCTTATCTAAA |
| 3431 | TTAGATAAGCCTTTTTAAA | 6992 | TTTAAAAAGGCTTATCTAA |
| 3432 | TAGATAAGCCTTTTTAAAA | 6993 | TTTTAAAAAGGCTTATCTA |
| 3433 | AGATAAGCCTTTTTAAAAT | 6994 | ATTTTAAAAAGGCTTATCT |
| 3434 | GATAAGCCTTTTTAAAATT | 6995 | AATTTTAAAAAGGCTTATC |
| 3435 | ATAAGCCTTTTTAAAATTC | 6996 | GAATTTTAAAAAGGCTTAT |
| 3436 | TAAGCCTTTTTAAAATTCT | 6997 | AGAATTTTAAAAAGGCTTA |
| 3437 | AAGCCTTTTTAAAATTCTT | 6998 | AAGAATTTTAAAAAGGCTT |
| 3438 | AGCCTTTTTAAAATTCTTT | 6999 | AAAGAATTTTAAAAAGGCT |
| 3439 | GCCTTTTTAAAATTCTTTC | 7000 | GAAAGAATTTTAAAAAGGC |
| 3440 | CCTTTTTAAAATTCTTTCT | 7001 | AGAAAGAATTTTAAAAAGG |
| 3441 | CTTTTTAAAATTCTTTCTG | 7002 | CAGAAAGAATTTTAAAAAG |
| 3442 | TTTTTAAAATTCTTTCTGA | 7003 | TCAGAAAGAATTTTAAAAA |
| 3443 | TTTTAAAATTCTTTCTGAT | 7004 | ATCAGAAAGAATTTTAAAA |
| 3444 | TTTAAAATTCTTTCTGATT | 7005 | AATCAGAAAGAATTTTAAA |
| 3445 | TTAAAATTCTTTCTGATTT | 7006 | AAATCAGAAAGAATTTTAA |
| 3446 | TAAAATTCTTTCTGATTTT | 7007 | AAAATCAGAAAGAATTTTA |
| 3447 | AAAATTCTTTCTGATTTTA | 7008 | TAAAATCAGAAAGAATTTT |
| 3448 | AAATTCTTTCTGATTTTAA | 7009 | TTAAAATCAGAAAGAATTT |
| 3449 | AATTCTTTCTGATTTTAAA | 7010 | TTTAAAATCAGAAAGAATT |
| 3450 | ATTCTTTCTGATTTTAAAT | 7011 | ATTTAAAATCAGAAAGAAT |
| 3451 | TTCTTTCTGATTTTAAATA | 7012 | TATTTAAAATCAGAAAGAA |
| 3452 | TCTTTCTGATTTTAAATAA | 7013 | TTATTTAAAATCAGAAAGA |
| 3453 | CTTTCTGATTTTAAATAAT | 7014 | ATTATTTAAAATCAGAAAG |
| 3454 | TTTCTGATTTTAAATAATG | 7015 | CATTATTTAAAATCAGAAA |
| 3455 | TTCTGATTTTAAATAATGC | 7016 | GCATTATTTAAAATCAGAA |
| 3456 | TCTGATTTTAAATAATGCG | 7017 | CGCATTATTTAAAATCAGA |
| 3457 | CTGATTTTAAATAATGCGT | 7018 | ACGCATTATTTAAAATCAG |
| 3458 | TGATTTTAAATAATGCGTC | 7019 | GACGCATTATTTAAAATCA |
| 3459 | GATTTTAAATAATGCGTCA | 7020 | TGACGCATTATTTAAAATC |
| 3460 | ATTTTAAATAATGCGTCAA | 7021 | TTGACGCATTATTTAAAAT |
| 3461 | TTTTAAATAATGCGTCAAA | 7022 | TTTGACGCATTATTTAAAA |
| 3462 | TTTAAATAATGCGTCAAAA | 7023 | TTTTGACGCATTATTTAAA |
| 3463 | TTAAATAATGCGTCAAAAA | 7024 | TTTTTGACGCATTATTTAA |
| 3464 | TAAATAATGCGTCAAAAAA | 7025 | TTTTTTGACGCATTATTTA |
| 3465 | AAATAATGCGTCAAAAAAT | 7026 | ATTTTTTGACGCATTATTT |
| 3466 | AATAATGCGTCAAAAAATG | 7027 | CATTTTTTGACGCATTATT |
| 3467 | ATAATGCGTCAAAAAATGT | 7028 | ACATTTTTTGACGCATTAT |
| 3468 | TAATGCGTCAAAAAATGTG | 7029 | CACATTTTTTGACGCATTA |
| 3469 | AATGCGTCAAAAAATGTGC | 7030 | GCACATTTTTTGACGCATT |
| 3470 | ATGCGTCAAAAAATGTGCA | 7031 | TGCACATTTTTTGACGCAT |
| 3471 | TGCGTCAAAAAATGTGCAG | 7032 | CTGCACATTTTTTGACGCA |
| 3472 | GCGTCAAAAAATGTGCAGA | 7033 | TCTGCACATTTTTTGACGC |
| 3473 | CGTCAAAAAATGTGCAGAA | 7034 | TTCTGCACATTTTTTGACG |
| 3474 | GTCAAAAAATGTGCAGAAA | 7035 | TTTCTGCACATTTTTTGAC |
| 3475 | TCAAAAAATGTGCAGAAAA | 7036 | TTTTCTGCACATTTTTTGA |
| 3476 | CAAAAAATGTGCAGAAAAT | 7037 | ATTTTCTGCACATTTTTTG |
| 3477 | AAAAAATGTGCAGAAAATG | 7038 | CATTTTCTGCACATTTTTT |
| 3478 | AAAAATGTGCAGAAAATGT | 7039 | ACATTTTCTGCACATTTTT |
| 3479 | AAAATGTGCAGAAAATGTA | 7040 | TACATTTTCTGCACATTTT |
| 3480 | AAATGTGCAGAAAATGTAT | 7041 | ATACATTTTCTGCACATTT |
| 3481 | AATGTGCAGAAAATGTATT | 7042 | AATACATTTTCTGCACATT |
| 3482 | ATGTGCAGAAAATGTATTG | 7043 | CAATACATTTTCTGCACAT |
| 3483 | TGTGCAGAAAATGTATTGC | 7044 | GCAATACATTTTCTGCACA |
| 3484 | GTGCAGAAAATGTATTGCA | 7045 | TGCAATACATTTTCTGCAC |
| 3485 | TGCAGAAAATGTATTGCAT | 7046 | ATGCAATACATTTTCTGCA |
| 3486 | GCAGAAAATGTATTGCATC | 7047 | GATGCAATACATTTTCTGC |
| 3487 | CAGAAAATGTATTGCATCC | 7048 | GGATGCAATACATTTTCTG |
| 3488 | AGAAAATGTATTGCATCCC | 7049 | GGGATGCAATACATTTTCT |
| 3489 | GAAAATGTATTGCATCCCT | 7050 | AGGGATGCAATACATTTTC |
| 3490 | AAAATGTATTGCATCCCTT | 7051 | AAGGGATGCAATACATTTT |
| 3491 | AAATGTATTGCATCCCTTG | 7052 | CAAGGGATGCAATACATTT |
| 3492 | AATGTATTGCATCCCTTGA | 7053 | TCAAGGGATGCAATACATT |
| 3493 | ATGTATTGCATCCCTTGAT | 7054 | ATCAAGGGATGCAATACAT |
| 3494 | TGTATTGCATCCCTTGATA | 7055 | TATCAAGGGATGCAATACA |
| 3495 | GTATTGCATCCCTTGATAC | 7056 | GTATCAAGGGATGCAATAC |
| 3496 | TATTGCATCCCTTGATACT | 7057 | AGTATCAAGGGATGCAATA |
| 3497 | ATTGCATCCCTTGATACTG | 7058 | CAGTATCAAGGGATGCAAT |
| 3498 | TTGCATCCCTTGATACTGT | 7059 | ACAGTATCAAGGGATGCAA |
| 3499 | TGCATCCCTTGATACTGTC | 7060 | GACAGTATCAAGGGATGCA |
| 3500 | GCATCCCTTGATACTGTCT | 7061 | AGACAGTATCAAGGGATGC |
| 3501 | CATCCCTTGATACTGTCTA | 7062 | TAGACAGTATCAAGGGATG |
| 3502 | ATCCCTTGATACTGTCTAA | 7063 | TTAGACAGTATCAAGGGAT |
| 3503 | TCCCTTGATACTGTCTAAC | 7064 | GTTAGACAGTATCAAGGGA |
| 3504 | CCCTTGATACTGTCTAACG | 7065 | CGTTAGACAGTATCAAGGG |
| 3505 | CCTTGATACTGTCTAACGA | 7066 | TCGTTAGACAGTATCAAGG |
| 3506 | CTTGATACTGTCTAACGAA | 7067 | TTCGTTAGACAGTATCAAG |
| 3507 | TTGATACTGTCTAACGAAT | 7068 | ATTCGTTAGACAGTATCAA |
| 3508 | TGATACTGTCTAACGAATA | 7069 | TATTCGTTAGACAGTATCA |
| 3509 | GATACTGTCTAACGAATAG | 7070 | CTATTCGTTAGACAGTATC |
| 3510 | ATACTGTCTAACGAATAGC | 7071 | GCTATTCGTTAGACAGTAT |
| 3511 | TACTGTCTAACGAATAGCA | 7072 | TGCTATTCGTTAGACAGTA |
| 3512 | ACTGTCTAACGAATAGCAC | 7073 | GTGCTATTCGTTAGACAGT |
| 3513 | CTGTCTAACGAATAGCACA | 7074 | TGTGCTATTCGTTAGACAG |
| 3514 | TGTCTAACGAATAGCACAT | 7075 | ATGTGCTATTCGTTAGACA |
| 3515 | GTCTAACGAATAGCACATA | 7076 | TATGTGCTATTCGTTAGAC |
| 3516 | TCTAACGAATAGCACATAA | 7077 | TTATGTGCTATTCGTTAGA |
| 3517 | CTAACGAATAGCACATAAC | 7078 | GTTATGTGCTATTCGTTAG |
| 3518 | TAACGAATAGCACATAACT | 7079 | AGTTATGTGCTATTCGTTA |
| 3519 | AACGAATAGCACATAACTC | 7080 | GAGTTATGTGCTATTCGTT |
| 3520 | ACGAATAGCACATAACTCA | 7081 | TGAGTTATGTGCTATTCGT |
| 3521 | CGAATAGCACATAACTCAT | 7082 | ATGAGTTATGTGCTATTCG |
| 3522 | GAATAGCACATAACTCATA | 7083 | TATGAGTTATGTGCTATTC |
| 3523 | AATAGCACATAACTCATAT | 7084 | ATATGAGTTATGTGCTATT |
| 3524 | ATAGCACATAACTCATATT | 7085 | AATATGAGTTATGTGCTAT |
| 3525 | TAGCACATAACTCATATTG | 7086 | CAATATGAGTTATGTGCTA |
| 3526 | AGCACATAACTCATATTGT | 7087 | ACAATATGAGTTATGTGCT |
| 3527 | GCACATAACTCATATTGTG | 7088 | CACAATATGAGTTATGTGC |
| 3528 | CACATAACTCATATTGTGA | 7089 | TCACAATATGAGTTATGTG |
| 3529 | ACATAACTCATATTGTGAA | 7090 | TTCACAATATGAGTTATGT |
| 3530 | CATAACTCATATTGTGAAT | 7091 | ATTCACAATATGAGTTATG |
| 3531 | ATAACTCATATTGTGAATC | 7092 | GATTCACAATATGAGTTAT |
| 3532 | TAACTCATATTGTGAATCC | 7093 | GGATTCACAATATGAGTTA |
| 3533 | AACTCATATTGTGAATCCT | 7094 | AGGATTCACAATATGAGTT |
| 3534 | ACTCATATTGTGAATCCTA | 7095 | TAGGATTCACAATATGAGT |
| 3535 | CTCATATTGTGAATCCTAT | 7096 | ATAGGATTCACAATATGAG |
| 3536 | TCATATTGTGAATCCTATG | 7097 | CATAGGATTCACAATATGA |
| 3537 | CATATTGTGAATCCTATGG | 7098 | CCATAGGATTCACAATATG |
| 3538 | ATATTGTGAATCCTATGGG | 7099 | CCCATAGGATTCACAATAT |
| 3539 | TATTGTGAATCCTATGGGT | 7100 | ACCCATAGGATTCACAATA |
| 3540 | ATTGTGAATCCTATGGGTC | 7101 | GACCCATAGGATTCACAAT |
| 3541 | TTGTGAATCCTATGGGTCT | 7102 | AGACCCATAGGATTCACAA |
| 3542 | TGTGAATCCTATGGGTCTT | 7103 | AAGACCCATAGGATTCACA |
| 3543 | GTGAATCCTATGGGTCTTG | 7104 | CAAGACCCATAGGATTCAC |
| 3544 | TGAATCCTATGGGTCTTGA | 7105 | TCAAGACCCATAGGATTCA |
| 3545 | GAATCCTATGGGTCTTGAG | 7106 | CTCAAGACCCATAGGATTC |
| 3546 | AATCCTATGGGTCTTGAGG | 7107 | CCTCAAGACCCATAGGATT |
| 3547 | ATCCTATGGGTCTTGAGGC | 7108 | GCCTCAAGACCCATAGGAT |
| 3548 | TCCTATGGGTCTTGAGGCC | 7109 | GGCCTCAAGACCCATAGGA |
| 3549 | CCTATGGGTCTTGAGGCCT | 7110 | AGGCCTCAAGACCCATAGG |
| 3550 | CTATGGGTCTTGAGGCCTG | 7111 | CAGGCCTCAAGACCCATAG |
| 3551 | TATGGGTCTTGAGGCCTGT | 7112 | ACAGGCCTCAAGACCCATA |
| 3552 | ATGGGTCTTGAGGCCTGTA | 7113 | TACAGGCCTCAAGACCCAT |
| 3553 | TGGGTCTTGAGGCCTGTAG | 7114 | CTACAGGCCTCAAGACCCA |
| 3554 | GGGTCTTGAGGCCTGTAGA | 7115 | TCTACAGGCCTCAAGACCC |
| 3555 | GGTCTTGAGGCCTGTAGAA | 7116 | TTCTACAGGCCTCAAGACC |
| 3556 | GTCTTGAGGCCTGTAGAAC | 7117 | GTTCTACAGGCCTCAAGAC |
| 3557 | TCTTGAGGCCTGTAGAACC | 7118 | GGTTCTACAGGCCTCAAGA |
| 3558 | CTTGAGGCCTGTAGAACCA | 7119 | TGGTTCTACAGGCCTCAAG |
| 3559 | TTGAGGCCTGTAGAACCAA | 7120 | TTGGTTCTACAGGCCTCAA |
| 3560 | TGAGGCCTGTAGAACCAAT | 7121 | ATTGGTTCTACAGGCCTCA |
| 3561 | GAGGCCTGTAGAACCAATC | 7122 | GATTGGTTCTACAGGCCTC |

[0381] TABLE 2
Human and Mouse Desmoglein 4 and Nude Polymorphisms

| | mRNA | Accession | Postion | | |
|---|---|---|---|---|---|
| Gene | (bp) | number | (nt) | From/To | Comments |
| human | 2697 | NM_003593 | 234 | T/C | Homo sapiens |
| Nude | | | 881 | T/C | forkhead |
| | | | 1260 | G/A | box N1 |
| | | | 1726 | C/A | (FOXN1), mRNA |
| | | | 1824 | G/C | |
| | | | 2230 | T/C | |
| mouse | 2503 | NM_008238 | | | Mus musculus |
| nude | | | | | forkhead |
| | | | | | box N1 |
| | | | | | (Foxn1), mRNA, |
| | | | | | NO know |
| | | | | | polymorphisms |
| human | 3579 | NM_177986 | 392 | G/A | Homo sapiens |
| DSG4 | | | 603 | T/C | desmoglein 4 |
| | | | 1674 | T/C | (DSG4), mRNA |
| | | | 1739 | T/C | |
| | | | 2065 | C/A | |
| | | | 2398 | G/A | |
| | | | 2490 | G/A | |
| | | | 2892 | G/A | |
| | | | 3201 | C/A | |
| | | | 3289 | T/C | |
| mouse | 3478 | NM_181564 | | | Mus musculus |
| dsg4 | | | | | desmoglein 4 |
| | | | | | (Dsg4), mRNA |
| | | | | | No known |
| | | | | | polymorphisms |

[0382] TABLE 3
Human DSG4 exemplary target regions
Using Accession number NM_177986

Loop 2572-2786
Loop 2083-2329
Loop 2383-2431
Loop 467-929
Loop 112-1248
Loop 1741-1834
Loop 28-1424
Loop 1932-3158
Loop 1585-1595
Loop 1707-3286
Loop 381-1086
Loop 2029-2836
Loop 1312-1373
Loop 1941-3112
Loop 295-1104
Loop 606-780
Loop 561-849
Loop 2130-2251
Loop 2474-2491
Loop 588-798
Loop 1542-1674
Loop 1999-2014
Loop 1180-3215
Loop 696-701
Loop 1878-1918
Loop 1361-1363
Loop 1759-1827
Loop 1441-3566
Loop 2923-3085
Loop 3017-3020
Loop 2203-2209
Loop 2963-3057
Loop 983-1061
Loop 2041-2532
Loop 2090-2295
Loop 1560-1662
Loop 39-1396
Loop 170-259
Loop 3184-3187
Loop 2146-2162
Loop 3392-3420
Loop 1527-3504
Loop 123-1237
Loop 308-365
Loop 489-882
Loop 1571-1627
Loop 1331-1340
Loop 502-866
Loop 3300-3486
Loop 155-270

[0383] TABLE 4
Human nude exemplary target regions
Using Accession number NM_003593

Loop 29-2474
Loop 300-484
Loop 811-2145
Loop 1284-2122
Loop 96-195
Loop 1375-2022
Loop 2208-2415
Loop 1765-1836
Loop 1903-1950
Loop 1441-1471
Loop 1183-1239
Loop 80-251
Loop 1421-1483
Loop 573-2425
Loop 356-412
Loop 1331-1361
Loop 670-710
Loop 752-2171
Loop 1392-1512
Loop 2578-2602
Loop 110-137
Loop 885-1055
Loop 274-284
Loop 505-537
Loop 841-1119
Loop 2571-2659
Loop 369-381
Loop 1555-2031
Loop 1555-2031
Loop 1661-1968
Loop 604-2189
Loop 1793-1797
Loop 916-933
Loop 1320-2115
Loop 2230-2230
Loop 947-1010
Loop 1773-1803
Loop 1814-1826
Loop 1168-1268
Loop 1375-2106
Loop 905-1048
Loop 2516-2694
Loop 1688-1721
Loop 2257-2389
Loop 2278-2375
Loop 1074-1081
Loop 1853-1960
Loop 1613-1982
Loop 1862-1869
Loop 2041-2045
Loop 1258-1263
Loop 447-457
Loop 622-737

[0384] TABLE 5

Human nude siRNA for mRNA (presented as
DNA sequences)
“NM_003593-Homo sapiens forkhead box N1
(FOXN1), complete mRNA (1-2697 bp)”

| | |
|---|---|
| SEQ | SEQ |
| ID | ID |

| | | | |
|---|---|---|---|
| NO: | Sense (5′-3′) | NO: | Antisense (5′-3′) |

| | | | |
|---|---|---|---|
| 7123 | ACGGCTTTCTTTGAGGCCA | 9802 | TGGCCTCAAAGAAAGCCGT |
| 7124 | CGGCTTTCTTTGAGGCCAG | 9803 | CTGGCCTCAAAGAAAGCCG |
| 7125 | GGCTTTCTTTGAGGCCAGG | 9804 | CCTGGCCTCAAAGAAAGCC |
| 7126 | GCTTTCTTTGAGGCCAGGA | 9805 | TCCTGGCCTCAAAGAAAGC |
| 7127 | CTTTCTTTGAGGCCAGGAC | 9806 | GTCCTGGCCTCAAAGAAAG |
| 7128 | TTTCTTTGAGGCCAGGACT | 9807 | AGTCCTGGCCTCAAAGAAA |
| 7129 | TTCTTTGAGGCCAGGACTG | 9808 | CAGTCCTGGCCTCAAAGAA |
| 7130 | TCTTTGAGGCCAGGACTGG | 9809 | CCAGTCCTGGCCTCAAAGA |
| 7131 | CTTTGAGGCCAGGACTGGG | 9810 | CCCAGTCCTGGCCTCAAAG |
| 7132 | TTTGAGGCCAGGAGTGGGT | 9811 | ACCCAGTCCTGGCCTCAAA |
| 7133 | TTGAGGCCAGGACTGGGTG | 9812 | CACCCAGTCCTGGCCTCAA |
| 7134 | TGAGGCCAGGACTGGGTGA | 9813 | TCACCCAGTCCTGGCCTCA |
| 7135 | GAGGCCAGGACTGGGTGAT | 9814 | ATCACCCAGTCCTGGCCTC |
| 7136 | AGGCCAGGACTGGGTGATG | 9815 | CATCACCCAGTCCTGGCCT |
| 7137 | GGCCAGGACTGGGTGATGG | 9816 | CCATCACCCAGTCCTGGCC |
| 7138 | GCCAGGACTGGGTGATGGT | 9817 | ACCATCACCCAGTCCTGGC |
| 7139 | CCAGGACTGGGTGATGGTG | 9818 | CACCATCACCCAGTCCTGG |
| 7140 | CAGGACTGGGTGATGGTGT | 9819 | ACACCATCACCCAGTCCTG |
| 7141 | AGGACTGGGTGATGGTGTC | 9820 | GACACCATCACCCAGTCCT |
| 7142 | GGACTGGGTGATGGTGTCG | 9821 | CGACACCATCACCCAGTCC |
| 7143 | GACTGGGTGATGGTGTCGC | 9822 | GCGACACCATCACCCAGTC |
| 7144 | ACTGGGTGATGGTGTCGCT | 9823 | AGCGACACCATCACCCAGT |
| 7145 | CTGGGTGATGGTGTCGCTA | 9824 | TAGCGACACCATCACCCAG |
| 7146 | TGGGTGATGGTGTCGCTAC | 9825 | GTAGCGACACCATCACCCA |
| 7147 | GGGTGATGGTGTCGCTACC | 9826 | GGTAGCGACACCATCACCC |
| 7148 | GGTGATGGTGTCGCTACCC | 9827 | GGGTAGCGACACCATCACC |
| 7149 | GTGATGGTGTCGCTACCGC | 9828 | GGGGTAGCGACACCATCAC |
| 7150 | TGATGGTGTCGCTACCCCC | 9829 | GGGGGTAGCGACACCATCA |
| 7151 | GATGGTGTCGCTACCCCGG | 9830 | CGGGGGTAGCGACACCATC |
| 7152 | ATGGTGTCGCTACCCCCGC | 9831 | GCGGGGGTAGCGACACCAT |
| 7153 | TGGTGTCGCTACCCCCGCC | 9832 | GGCGGGGGTAGCGACACCA |
| 7154 | GGTGTCGCTACCCCCGCCG | 9833 | CGGCGGGGGTAGCGACACC |
| 7155 | GTGTCGCTACCCCCGCCGC | 9834 | GCGGCGGGGGTAGCGACAC |
| 7156 | TGTCGCTACCCCCGCCGCA | 9835 | TGCGGCGGGGGTAGCGACA |
| 7157 | GTCGCTAGCCCGGCCGCAG | 9836 | CTGCGGCGGGGGTAGCGAC |
| 7158 | TCGCTACCCCCGCCGCAGT | 9837 | ACTGCGGCGGGGGTAGCGA |
| 7159 | CGCTACCCCCGCGGCAGTC | 9838 | GACTGCGGCGGGGGTAGCG |
| 7160 | GCTACCCCCGCCGCAGTCT | 9839 | AGACTGCGGCGGGGGTAGC |
| 7161 | CTACCCCCGCCGCAGTCTG | 9840 | CAGAGTGCGGCGGGGGTAG |
| 7162 | TACCCCCGCCGCAGTCTGA | 9841 | TCAGACTGCGGCGGGGGTA |
| 7163 | ACCCCCGCCGCAGTCTGAC | 9842 | GTCAGACTGCGGCGGGGGT |
| 7164 | CCCCCGCCGCAGTCTGACG | 9843 | CGTCAGACTGCGGCGGGGG |
| 7165 | CCCCGCCGCAGTCTGACGT | 9844 | AGGTCAGACTGCGGCGGGG |
| 7166 | CCCGCCGCAGTCTGACGTC | 9845 | GACGTCAGACTGCGGCGGG |
| 7167 | CCGCCGCAGTCTGACGTCA | 9846 | TGACGTCAGACTGCGGCGG |
| 7168 | CGCCGCAGTCTGACGTCAC | 9847 | GTGACGTCAGACTGCGGCG |
| 7169 | GCCGCAGTCTGACGTCACG | 9848 | CGTGACGTCAGACTGCGGC |
| 7170 | CCGCAGTCTGACGTCAGGC | 9849 | GCGTGACGTCAGACTGCGG |
| 7171 | CGCAGTCTGACGTCACGCT | 9850 | AGCGTGACGTCAGACTGCG |
| 7172 | GCAGTCTGACGTCACGCTG | 9851 | CAGCGTGACGTCAGACTGC |
| 7173 | CAGTCTGACGTCACGCTGC | 9852 | GCAGCGTGACGTCAGACTG |
| 7174 | AGTCTGACGTCACGCTGCC | 9853 | GGCAGCGTGACGTCAGACT |
| 7175 | GTCTGACGTCACGCTGCCG | 9854 | CGGCAGCGTGACGTCAGAC |
| 7176 | TCTGACGTCACGCTGCCGG | 9855 | CCGGCAGCGTGACGTCAGA |
| 7177 | CTGACGTCACGCTGCCGGG | 9856 | CCCGGCAGCGTGACGTCAG |
| 7178 | TGACGTCACGCTGCCGGGC | 9857 | GCCCGGCAGCGTGACGTCA |
| 7179 | GACGTCACGCTGCCGGGCC | 9858 | GGCCCGGCAGCGTGACGTC |
| 7180 | ACGTCACGCTGCCGGGCCC | 9859 | GGGCCCGGCAGCGTGACGT |
| 7181 | CGTCACGCTGCCGGGCCCC | 9860 | GGGGCCCGGCAGCGTGACG |
| 7182 | GTCACGCTGCCGGGCCCCA | 9861 | TGGGGCCCGGCAGCGTGAC |
| 7183 | TCACGCTGCCGGGCCCCAC | 9862 | GTGGGGCCCGGCAGCGTGA |
| 7184 | CACGCTGCCGGGCCCCACC | 9863 | GGTGGGGCCCGGCAGCGTG |
| 7185 | ACGCTGCCGGGCCCCACCA | 9864 | TGGTGGGGCCCGGCAGCGT |
| 7186 | CGCTGCCGGGCCCCACCAG | 9865 | CTGGTGGGGCCCGGCAGCG |
| 7187 | GCTGCCGGGCCCCACCAGA | 9866 | TCTGGTGGGGCCCGGCAGC |
| 7188 | CTGCCGGGCCCCACCAGAC | 9867 | GTCTGGTGGGGCCCGGCAG |
| 7189 | TGCCGGGCCCCACCAGACT | 9868 | AGTCTGGTGGGGCCCGGCA |
| 7190 | GCCGGGCCCCACCAGACTG | 9869 | CAGTCTGGTGGGGCCCGGC |
| 7191 | CCGGGCCCCACCAGACTGG | 9870 | CCAGTCTGGTGGGGCCCGG |
| 7192 | CGGGCCCCACGAGACTGGA | 9871 | TCCAGTCTGGTGGGGCCCG |
| 7193 | GGGCCCCACCAGACTGGAG | 9872 | CTCCAGTCTGGTGGGGCCC |
| 7194 | GGCCCCACCAGACTGGAGG | 9873 | CCTCCAGTCTGGTGGGGCC |
| 7195 | GCCCCACCAGACTGGAGGG | 9874 | CCCTCCAGTCTGGTGGGGC |
| 7196 | CCCCACCAGACTGGAGGGC | 9875 | GCCCTCCAGTCTGGTGGGG |
| 7197 | CCCACCAGACTGGAGGGCG | 9876 | CGCCGTCCAGTCTGGTGGG |
| 7198 | CCACCAGACTGGAGGGCGA | 9877 | TCGCCCTCCAGTCTGGTGG |
| 7199 | CACCAGACTGGAGGGCGAG | 9878 | CTCGCCCTCCAGTCTGGTG |
| 7200 | ACCAGACTGGAGGGCGAGC | 9879 | GCTCGCCCTCCAGTCTGGT |
| 7201 | CCAGACTGGAGGGCGAGCG | 9880 | CGCTCGCCCTCCAGTCTGG |
| 7202 | CAGACTGGAGGGCGAGCGC | 9881 | GCGCTCGCCCTCCAGTCTG |
| 7203 | AGACTGGAGGGCGAGCGCC | 9882 | GGCGCTCGCCCTCCAGTCT |
| 7204 | GACTGGAGGGCGAGCGCCA | 9883 | TGGCGCTCGCCCTCCAGTC |
| 7205 | ACTGGAGGGCGAGCGCCAA | 9884 | TTGGCGCTCGCCCTCCAGT |
| 7206 | CTGGAGGGCGAGCGCCAAG | 9885 | CTTGGCGCTCGCCCTCCAG |
| 7207 | TGGAGGGCGAGCGGCAAGG | 9886 | CCTTGGCGCTCGCCCTCCA |
| 7208 | GGAGGGCGAGCGCCAAGGG | 9887 | CCCTTGGCGCTCGCCCTCC |
| 7209 | GAGGGCGAGCGCCAAGGGG | 9888 | CCCCTTGGCGCTCGCCCTC |
| 7210 | AGGGCGAGCGCCAAGGGGA | 9889 | TCCCCTTGGCGCTCGCCCT |
| 7211 | GGGCGAGCGCCAAGGGGAC | 9890 | GTCCCCTTGGCGCTCGCCC |
| 7212 | GGCGAGCGCCAAGGGGACC | 9891 | GGTCCCCTTGGCGCTCGCC |
| 7213 | GCGAGCGCCAAGGGGACCT | 9892 | AGGTCCCCTTGGCGCTCGC |
| 7214 | CGAGCGCCAAGGGGACCTC | 9893 | GAGGTCCCCTTGGCGCTCG |
| 7215 | GAGCGCCAAGGGGACCTCA | 9894 | TGAGGTCCCCTTGGCGCTC |
| 7216 | AGCGGCAAGGGGACCTCAT | 9895 | ATGAGGTCCCCTTGGCGC |
| 7217 | GCGCCAAGGGGACCTCATG | 9896 | CATGAGGTCCCCTTGGCG |
| 7218 | CGCCAAGGGGACCTCATGC | 9897 | GCATGAGGTCCCCTTGGC |
| 7219 | GCCAAGGGGACCTCATGCA | 9898 | TGCATGAGGTCCCCTTGGC |
| 7220 | CCAAGGGGACCTCATGCAG | 9899 | CTGCATGAGGTCCCCTTGG |
| 7221 | CAAGGGGACCTCATGCAGG | 9900 | CCTGCATGAGGTCCCCTTG |
| 7222 | AAGGGGACCTCATGCAGGC | 9901 | GCCTGCATGAGGTCCCCTT |
| 7223 | AGGGGACCTGATGCAGGCA | 9902 | TGCCTGCATGAGGTCCGCT |
| 7224 | GGGGACCTCATGCAGGCAC | 9903 | GTGCCTGCATGAGGTCCCC |
| 7225 | GGGACCTCATGCAGGCACC | 9904 | GGTGCCTGCATGAGGTCCC |
| 7226 | GGACCTCATGCAGGCACCG | 9905 | CGGTGCCTGCATGAGGTCC |
| 7227 | GACCTCATGCAGGCACCGG | 9906 | CCGGTGCCTGCATGAGGTC |
| 7228 | ACCTCATGCAGGCACCGGG | 9907 | CCCGGTGCCTGCATGAGGT |
| 7229 | CCTCATGCAGGCACCGGGC | 9908 | GCCCGGTGCCTGCATGAGG |
| 7230 | CTCATGCAGGCACCGGGCC | 9909 | GGCCCGGTGCCTGCATGAG |
| 7231 | TCATGCAGGCACCGGGCCT | 9910 | AGGCCCGGTGCCTGCATGA |
| 7232 | CATGCAGGCACCGGGCCTC | 9911 | GAGGCCCGGTGCCTGCATG |
| 7233 | ATGCAGGCACGGGGCCTCC | 9912 | GGAGGCCCGGTGCCTGCAT |
| 7234 | TGCAGGCACCGGGCCTCCC | 9913 | GGGAGGCCCGGTGCCTGCA |
| 7235 | GCAGGCACCGGGCCTCCCA | 9914 | TGGGAGGCCCGGTGCCTGC |
| 7236 | CAGGCACCGGGCGTCCCAG | 9915 | CTGGGAGGCCCGGTGCCTG |
| 7237 | AGGCACCGGGCCTCCCAGG | 9916 | CCTGGGAGGCCCGGTGCCT |
| 7238 | GGCACCGGGCCTCCCAGGC | 9917 | GCCTGGGAGGCCCGGTGCC |
| 7239 | GCACCGGGCCTCCCAGGCT | 9918 | AGCCTGGGAGGCCCGGTGC |
| 7240 | CACCGGGCCTCCCAGGCTC | 9919 | GAGCCTGGGAGGCCCGGTG |
| 7241 | ACCGGGCCTCGCAGGCTCC | 9920 | GGAGCCTGGGAGGCCCGGT |
| 7242 | CCGGGCCTCCCAGGCTCCC | 9921 | GGGAGCCTGGGAGGCCCGG |
| 7243 | CGGGCCTCCCAGGCTCCCC | 9922 | GGGGAGCCTGGGAGGCCCG |
| 7244 | GGGCCTCCCAGGCTCCCCT | 9923 | AGGGGAGCCTGGGAGGCCC |
| 7245 | GGCCTCCCAGGCTCCCCTG | 9924 | CAGGGGAGCCTGGGAGGCC |
| 7246 | GCCTCCCAGGCTCCCCTGC | 9925 | GCAGGGGAGCCTGGGAGGC |
| 7247 | CCTCCCAGGCTCCCCTGCC | 9926 | GGCAGGGGAGCCTGGGAGG |
| 7248 | CTCCCAGGCTCCGCTGCCC | 9927 | GGGCAGGGGAGCCTGGGAG |
| 7249 | TCCCAGGCTCGCCTGCCCC | 9928 | GGGGCAGGGGAGCCTGGGA |
| 7250 | CCCAGGCTCCCCTGCCCCA | 9929 | TGGGGCAGGGGAGCCTGGG |
| 7251 | CCAGGCTCCCGTGCCCCAC | 9930 | GTGGGGCAGGGGAGCCTGG |
| 7252 | CAGGCTCCCCTGCCCCACA | 9931 | TGTGGGGCAGGGGAGCCTG |
| 7253 | AGGCTCCCCTGCCCCACAG | 9932 | CTGTGGGGCAGGGGAGCCT |
| 7254 | GGCTCCCCTGCCCCACAGA | 9933 | TCTGTGGGGCAGGGGAGCC |
| 7255 | GCTCCCCTGCCCCACAGAG | 9934 | CTCTGTGGGGCAGGGGAGC |
| 7256 | CTCCCCTGCCCCACAGAGT | 9935 | ACTCTGTGGGGCAGGGGAG |
| 7257 | TCCCCTGCCCCACAGAGTA | 9936 | TACTCTGTGGGGCAGGGGA |
| 7258 | CCCCTGCCCCACAGAGTAA | 9937 | TTACTCTGTGGGGCAGGGG |
| 7259 | CCCTGCCCCACAGAGTAAG | 9938 | CTTACTCTGTGGGGCAGGG |
| 7260 | GCTGCCCCACAGAGTAAGC | 9939 | GCTTACTCTGTGGGGCAGG |
| 7261 | CTGCCCCACAGAGTAAGCA | 9940 | TGCTTACTCTGTGGGGCAG |
| 7262 | TGCCCCACAGAGTAAGCAT | 9941 | ATGCTTACTCTGTGGGGCA |
| 7263 | GCCCCACAGAGTAAGCATG | 9942 | CATGCTTACTCTGTGGGGC |
| 7264 | CCCCACAGAGTAAGCATGC | 9943 | GCATGCTTACTCTGTGGGG |
| 7265 | CCCACAGAGTAAGCATGCC | 9944 | GGGATGCTTACTCTGTGGG |
| 7266 | CCACAGAGTAAGCATGCCG | 9945 | CGGCATGCTTACTCTGTGG |
| 7267 | CACAGAGTAAGCATGCCGG | 9946 | CCGGCATGCTTACTCTGTG |
| 7268 | ACAGAGTAAGCATGCCGGC | 9947 | GCCGGCATGCTTACTCTGT |
| 7269 | CAGAGTAAGCATGCCGGCT | 9948 | AGCCGGCATGCTTACTCTG |
| 7270 | AGAGTAAGCATGCCGGCTT | 9949 | AAGCCGGCATGCTTACTCT |
| 7271 | GAGTAAGCATGCCGGCTTC | 9950 | GAAGCCGGCATGCTTACTC |
| 7272 | AGTAAGCATGCCGGCTTCA | 9951 | TGAAGCCGGCATGCTTACT |
| 7273 | GTAAGCATGCCGGCTTCAG | 9952 | CTGAAGCCGGCATGCTTAC |
| 7274 | TAAGCATGCCGGCTTCAGC | 9953 | GCTGAAGCCGGCATGCTTA |
| 7275 | AAGCATGCCGGCTTCAGCT | 9954 | AGCTGAAGCCGGCATGCTT |
| 7276 | AGCATGCCGGCTTCAGCTG | 9955 | CAGCTGAAGCCGGCATGCT |
| 7277 | GCATGCCGGCTTCAGCTGC | 9956 | GCAGCTGAAGCCGGCATGC |
| 7278 | CATGCCGGCTTCAGCTGCT | 9957 | AGCAGCTGAAGCCGGCATG |
| 7279 | ATGCCGGCTTCAGGTGCTC | 9958 | GAGCAGCTGAAGCCGGCAT |
| 7280 | TGCCGGCTTCAGCTGCTCG | 9959 | CGAGCAGCTGAAGCCGGCA |
| 7281 | GCCGGCTTCAGCTGCTCGT | 9960 | ACGAGCAGCTGAAGCCGGC |
| 7282 | CGGGCTTCAGCTGCTCGTC | 9961 | GACGAGCAGCTGAAGCCGG |
| 7283 | GGGCTTCAGCTGCTCGTCA | 9962 | TGACGAGCAGCTGAAGCCG |
| 7284 | GGCTTCAGCTGCTGGTCAT | 9963 | ATGACGAGCAGCTGAAGCG |
| 7285 | GCTTCAGCTGCTCGTCATT | 9964 | AATGACGAGCAGCTGAAGC |
| 7286 | CTTCAGCTGCTCGTCATTT | 9965 | AAATGACGAGCAGCTGAAG |
| 7287 | TTCAGCTGCTCGTCATTTG | 9966 | CAAATGACGAGCAGCTGAA |
| 7288 | TCAGCTGCTCGTCATTTGT | 9967 | ACAAATGACGAGCAGCTGA |
| 7289 | CAGCTGGTCGTCATTTGTG | 9968 | CACAAATGACGAGCAGCTG |
| 7290 | AGCTGCTCGTCATTTGTGT | 9969 | ACACAAATGACGAGCAGCT |
| 7291 | GCTGCTCGTCATTTGTGTC | 9970 | GACACAAATGACGAGCAGC |
| 7292 | CTGCTCGTCATTTGTGTCC | 9971 | GGACACAAATGACGAGCAG |
| 7293 | TGCTCGTCATTTGTGTCCG | 9972 | CGGACACAAATGACGAGCA |
| 7294 | GCTCGTCATTTGTGTCCGA | 9973 | TCGGACACAAATGACGAGC |
| 7295 | GTCGTCATTTGTGTCCGAC | 9974 | GTCGGACACAAATGACGAG |
| 7296 | TCGTCATTTGTGTGCGACG | 9975 | CGTCGGACACAAATGACGA |
| 7297 | CGTCATTTGTGTCCGACGG | 9976 | CCGTCGGACACAAATGACG |
| 7298 | GTCATTTGTGTCCGACGGC | 9977 | GCCGTCGGACACAAATGAC |
| 7299 | TCATTTGTGTCCGACGGCC | 9978 | GGCCGTCGGACACAAATGA |
| 7300 | CATTTGTGTCCGACGGCCC | 9979 | GGGCCGTCGGACACAAATG |
| 7301 | ATTTGTGTCCGACGGCCCT | 9980 | AGGGCCGTCGGACACAAAT |
| 7302 | TTTGTGTCCGACGGCCCTC | 9981 | GAGGGCCGTCGGACACAAA |
| 7303 | TTGTGTCCGACGGCCCTCC | 9982 | GGAGGGCCGTCGGACACAA |
| 7304 | TGTGTCCGACGGCCCTCCA | 9983 | TGGAGGGCCGTCGGACACA |
| 7305 | GTGTCCGACGGCCCTCCAG | 9984 | CTGGAGGGCCGTCGGACAC |
| 7306 | TGTCCGACGGCCCTCCAGA | 9985 | TCTGGAGGGCCGTCGGACA |
| 7307 | GTCCGACGGCCCTCCAGAG | 9986 | CTCTGGAGGGCCGTCGGAC |
| 7308 | TCCGACGGCCCTCCAGAGA | 9987 | TCTCTGGAGGGCCGTCGGA |
| 7309 | CCGACGGCCCTCCAGAGAG | 9988 | CTCTCTGGAGGGCCGTCGG |
| 7310 | GGACGGCCCTCCAGAGAGG | 9989 | CCTCTCTGGAGGGCCGTCG |
| 7311 | GACGGCCCTCCAGAGAGGA | 9990 | TCCTCTCTGGAGGGCCGTC |
| 7312 | ACGGCCCTCCAGAGAGGAC | 9991 | GTCCTCTCTGGAGGGCCGT |
| 7313 | CGGCCCTCCAGAGAGGACA | 9992 | TGTCCTCTCTGGAGGGCCG |
| 7314 | GGCCCTCCAGAGAGGACAC | 9993 | GTGTCCTCTCTGGAGGGCC |
| 7315 | GCCCTCCAGAGAGGACACC | 9994 | GGTGTCCTCTCTGGAGGGC |
| 7316 | CCCTCCAGAGAGGACACCC | 9995 | GGGTGTCCTCTCTGGAGGG |
| 7317 | CCTCCAGAGAGGACACCCT | 9996 | AGGGTGTCCTCTCTGGAGG |
| 7318 | CTCCAGAGAGGACACCCTC | 9997 | GAGGGTGTCCTCTCTGGAG |
| 7319 | TCCAGAGAGGACACCCTCA | 9998 | TGAGGGTGTCCTCTCTGGA |
| 7320 | CCAGAGAGGACACCCTCAC | 9999 | GTGAGGGTGTCCTCTCTGG |
| 7321 | CAGAGAGGACACCCTCACT | 10000 | AGTGAGGGTGTCCTCTCTG |
| 7322 | AGAGAGGACACCCTCACTG | 10001 | CAGTGAGGGTGTCCTCTCT |
| 7323 | GAGAGGACACCCTCACTGC | 10002 | GCAGTGAGGGTGTCCTCTC |
| 7324 | AGAGGACACCCTCACTGCC | 10003 | GGCAGTGAGGGTGTCCTCT |
| 7325 | GAGGACACCCTCACTGCCC | 10004 | GGGCAGTGAGGGTGTCCTC |
| 7326 | AGGACACCCTCACTGCCCC | 10005 | GGGGCAGTGAGGGTGTCCT |
| 7327 | GGACACCCTCACTGCCCCC | 10006 | GGGGGCAGTGAGGGTGTCC |
| 7328 | GACACCCTCACTGCCCCCA | 10007 | TGGGGGCAGTGAGGGTGTC |
| 7329 | ACACCCTCACTGCCCCCAC | 10008 | GTGGGGGCAGTGAGGGTGT |
| 7330 | CACCCTCACTGCCCCCACA | 10009 | TGTGGGGGCAGTGAGGGTG |
| 7331 | ACCCTCACTGCCCCCACAC | 10010 | GTGTGGGGGCAGTGAGGGT |
| 7332 | CCCTCACTGCCCCCACACA | 10011 | TGTGTGGGGGCAGTGAGGG |
| 7333 | CCTCACTGCCGCCACACAG | 10012 | CTGTGTGGGGGCAGTGAGG |
| 7334 | CTCACTGCCCCCACACAGC | 10013 | GCTGTGTGGGGGCAGTGAG |
| 7335 | TCACTGCCGCCACACAGCC | 10014 | GGCTGTGTGGGGGCAGTGA |
| 7336 | CACTGCCCCCACACAGCCC | 10015 | GGGCTGTGTGGGGGCAGTG |
| 7337 | ACTGCCCCCACACAGCCCC | 10016 | GGGGCTGTGTGGGGGCAGT |
| 7338 | CTGCCCCCACACAGCCCCC | 10017 | GGGGGCTGTGTGGGGGCAG |
| 7339 | TGCCCCCACACAGCCCCCG | 10018 | CGGGGGCTGTGTGGGGGCA |
| 7340 | GCCCCCACACAGCCCCCGC | 10019 | GCGGGGGCTGTGTGGGGGC |
| 7341 | CCCCCACACAGCCCCCGCA | 10020 | TGCGGGGGCTGTGTGGGGG |
| 7342 | CCCCACACAGCCCCCGCAT | 10021 | ATGCGGGGGCTGTGTGGGG |
| 7343 | CCCACACAGCCCCCGCATT | 10022 | AATGCGGGGGCTGTGTGGG |
| 7344 | CCACACAGCCCCCGCATTG | 10023 | CAATGCGGGGGCTGTGTGG |
| 7345 | CACACAGCCCCCGCATTGC | 10024 | GCAATGCGGGGGCTGTGTG |
| 7346 | ACACAGCCCCCGCATTGCG | 10025 | CGCAATGCGGGGGCTGTGT |
| 7347 | GACAGCCCCCGCATTGCGT | 10026 | ACGCAATGCGGGGGCTGTG |
| 7348 | ACAGCCCCCGCATTGCGTG | 10027 | GACGCAATGCGGGGGCTGT |
| 7349 | CAGCCCCCGCATTGCGTCA | 10028 | TGACGCAATGCGGGGGCTG |
| 7350 | AGCCCCCGCATTGCGTCAC | 10029 | GTGACGCAATGCGGGGGCT |
| 7351 | GCCCCCGCATTGCGTCACC | 10030 | GGTGACGCAATGCGGGGGC |
| 7352 | CCCCCGCATTGCGTCACCA | 10031 | TGGTGACGCAATGCGGGGG |
| 7353 | CCCCGCATTGCGTCACCAG | 10032 | CTGGTGACGCAATGCGGGG |
| 7354 | CCCGCATTGCGTGACCAGG | 10033 | CCTGGTGACGCAATGCGGG |
| 7355 | CCGCATTGCGTCACCAGGG | 10034 | CCCTGGTGACGCAATGCGG |
| 7356 | CGCATTGCGTCACCAGGGG | 10035 | GCCCTGGTGACGCAATGCG |
| 7357 | GCATTGCGTCACCAGGGCC | 10036 | GGCCCTGGTGACGCAATGC |
| 7358 | CATTGCGTCACCAGGGCCC | 10037 | GGGCCCTGGTGACGCAATG |
| 7359 | ATTGCGTCACCAGGGCCCG | 10038 | CGGGCCCTGGTGACGCAAT |
| 7360 | TTGCGTCACCAGGGCCCGA | 10039 | TCGGGCCCTGGTGACGCAA |
| 7361 | TGCGTCACCAGGGCCCGAG | 10040 | CTCGGGCCCTGGTGACGCA |
| 7362 | GCGTCACCAGGGCCCGAGC | 10041 | GCTCGGGCCCTGGTGACGC |
| 7363 | CGTCACCAGGGCCCGAGCA | 10042 | TGCTCGGGCCCTGGTGACG |
| 7364 | GTCACCAGGGCCCGAGCAA | 10043 | TTGCTGGGGCCCTGGTGAC |
| 7365 | TCACCAGGGCCCGAGCAAG | 10044 | CTTGCTCGGGCCCTGGTGA |
| 7366 | CACCAGGGCCCGAGCAAGT | 10045 | ACTTGCTCGGGCCCTGGTG |
| 7367 | ACCAGGGCCCGAGCAAGTC | 10046 | GACTTGCTCGGGCCCTGGT |
| 7368 | CCAGGGCCCGAGCAAGTCC | 10047 | GGACTTGCTCGGGCCCTGG |
| 7369 | CAGGGCCCGAGCAAGTCCA | 10048 | TGGACTTGCTCGGGCCCTG |
| 7370 | AGGGCCCGAGCAAGTCCAG | 10049 | CTGGACTTGCTCGGGCGCT |
| 7371 | GGGCCCGAGCAAGTCCAGG | 10050 | CCTGGACTTGCTCGGGCCC |
| 7372 | GGCCCGAGGAAGTCCAGGG | 10051 | CCCTGGACTTGCTCGGGCC |
| 7373 | GCCCGAGCAAGTCCAGGGC | 10052 | GCCCTGGACTTGCTCGGGC |
| 7374 | CCCGAGCAAGTCCAGGGCC | 10053 | GGCCCTGGACTTGCTCGGG |
| 7375 | CCGAGCAAGTCCAGGGCCA | 10054 | TGGCCCTGGACTTGCTCGG |
| 7376 | CGAGCAAGTCCAGGGCCAC | 10055 | GTGGCCCTGGACTTGCTCG |
| 7377 | GAGCAAGTCCAGGGCCACT | 10056 | AGTGGCCCTGGACTTGCTC |
| 7378 | AGCAAGTCCAGGGCCACTG | 10057 | CAGTGGCCCTGGACTTGCT |
| 7379 | GCAAGTCCAGGGCCACTGC | 10058 | GCAGTGGCCCTGGACTTGC |
| 7380 | CAAGTCCAGGGCCACTGCC | 10059 | GGCAGTGGCCCTGGACTTG |
| 7381 | AAGTCCAGGGCCACTGCCC | 10060 | GGGCAGTGGCCCTGGACTT |
| 7382 | AGTCCAGGGCCACTGCCCA | 10061 | TGGGCAGTGGCCCTGGACT |
| 7383 | GTCCAGGGCCACTGCCCAG | 10062 | CTGGGCAGTGGCCCTGGAC |
| 7384 | TCCAGGGCCACTGCCCAGC | 10063 | GCTGGGCAGTGGCCCTGGA |
| 7385 | CCAGGGCCACTGCCCAGCC | 10064 | GGCTGGGCAGTGGCCCTGG |
| 7386 | CAGGGCCACTGCCCAGCCG | 10065 | CGGCTGGGCAGTGGCCCTG |
| 7387 | AGGGCCACTGCCCAGCCGG | 10066 | CCGGCTGGGCAGTGGCCCT |
| 7388 | GGGCCACTGCCGAGCCGGC | 10067 | GCCGGCTGGGCAGTGGCCC |
| 7389 | GGCCACTGCCCAGCCGGCC | 10068 | GGCCGGCTGGGCAGTGGCC |
| 7390 | GCCACTGCCCAGCCGGCCC | 10069 | GGGCCGGCTGGGCAGTGGC |
| 7391 | CCACTGCCCAGCCGGCCCC | 10070 | GGGGCCGGCTGGGCAGTGG |
| 7392 | CACTGCCCAGCCGGCCCCG | 10071 | CGGGGCCGGCTGGGCAGTG |
| 7393 | ACTGCCCAGCCGGCCCCGG | 10072 | CCGGGGCCGGCTGGGCAGT |
| 7394 | CTGCCCAGCCGGCCCCGGC | 10073 | GCCGGGGCCGGCTGGGCAG |
| 7395 | TGCCCAGCCGGCCCCGGCC | 10074 | GGCCGGGGCCGGCTGGGCA |
| 7396 | GCCCAGCCGGCCCCCGCCC | 10075 | GGGCCGGGGCCGGCTGGGC |
| 7397 | CCCAGCCGGCCCCGGCCCT | 10076 | AGGGCCGGGGCCGGCTGGG |
| 7398 | CCAGCCGGCCCCGGCCCTG | 10077 | CAGGGCCGGGGCCGGCTGG |
| 7399 | CAGCCGGCCCCGGCCCTGG | 10078 | CCAGGGCCGGGGCCGGCTG |
| 7400 | AGCCGGCCCCGGCCCTGGG | 10079 | CCCAGGGCCGGGGCCGGCT |
| 7401 | GCCGGCCCCGGCCCTGGGC | 10080 | GCCCAGGGCCGGGGCCGGC |
| 7402 | CCGGCCCCGGCCCTGGGCC | 10081 | GGCCCAGGGCCGGGGCCGG |
| 7403 | CGGCCCCGGCCCTGGGCCC | 10082 | GGGCCCAGGGCCGGGGCCG |
| 7404 | GGCCCCGGCCCTGGGCCCT | 10083 | AGGGCCCAGGGCCGGGGCC |
| 7405 | GCCCCGGCCCTGGGCCCTT | 10084 | AAGGGCCCAGGGCCGGGGC |
| 7406 | CCCCGGCCCTGGGCCCTTC | 10085 | GAAGGGCCCAGGGCCGGGG |
| 7407 | CCCGGCCCTGGGCCCTTCA | 10086 | TGAAGGGCCCAGGGCCGGG |
| 7408 | CCGGCCCTGGGCCCTTCAG | 10087 | CTGAAGGGCCCAGGGCCGG |
| 7409 | CGGCCCTGGGCCCTTCAGG | 10088 | CCTGAAGGGCCCAGGGCCG |
| 7410 | GGCCCTGGGCCCTTCAGGC | 10089 | GCCTGAAGGGCCCAGGGCC |
| 7411 | GCCCTGGGCCCTTCAGGCT | 10090 | AGCCTGAAGGGCCCAGGGC |
| 7412 | CCCTGGGCCCTTCAGGCTC | 10091 | GAGCCTGAAGGGCCCAGGG |
| 7413 | CCTGGGCCCTTCAGGCTCT | 10092 | AGAGCCTGAAGGGCCCAGG |
| 7414 | CTGGGCCCTTCAGGCTCTC | 10093 | GAGAGCCTGAAGGGCCCAG |
| 7415 | TGGGCCCTTCAGGCTCTCA | 10094 | TGAGAGCCTGAAGGGCCCA |
| 7416 | GGGCCCTTCAGGCTCTCAC | 10095 | GTGAGAGCCTGAAGGGCCC |
| 7417 | GGCCCTTCAGGCTCTCACC | 10096 | GGTGAGAGCCTGAAGGGCC |
| 7418 | GCCCTTCAGGCTCTGACCC | 10097 | GGGTGAGAGCCTGAAGGGC |
| 7419 | CCCTTCAGGCTCTCACCCT | 10098 | AGGGTGAGAGCCTGAAGGG |
| 7420 | CCTTCAGGCTCTCACCCTC | 10099 | GAGGGTGAGAGCCTGAAGG |
| 7421 | CTTCAGGCTCTCACCCTCA | 10100 | TGAGGGTGAGAGCCTGAAG |
| 7422 | TTGAGGCTCTCACCCTCAG | 10101 | CTGAGGGTGAGAGCCTGAA |
| 7423 | TCAGGCTCTCACCCTCAGA | 10102 | TCTGAGGGTGAGAGCCTGA |
| 7424 | CAGGCTCTCACCCTCAGAC | 10103 | GTCTGAGGGTGAGAGCCTG |
| 7425 | AGGCTCTCACCCTCAGACA | 10104 | TGTCTGAGGGTGAGAGCCT |
| 7426 | GGCTCTCACCCTCAGACAA | 10105 | TTGTCTGAGGGTGAGAGCC |
| 7427 | GCTCTCACCCTCAGACAAG | 10106 | CTTGTCTGAGGGTGAGAGC |
| 7428 | CTCTCACCCTCAGACAAGT | 10107 | ACTTGTCTGAGGGTGAGAG |
| 7429 | TCTCACCCTCAGACAAGTA | 10108 | TACTTGTCTGAGGGTGAGA |
| 7430 | CTCACCCTCAGACAAGTAT | 10109 | ATACTTGTCTGAGGGTGAG |
| 7431 | TCACCCTCAGACAAGTATC | 10110 | GATACTTGTCTGAGGGTGA |
| 7432 | CACCCTCAGACAAGTATCC | 10111 | GGATACTTGTCTGAGGGTG |
| 7433 | ACCCTCAGACAAGTATCCT | 10112 | AGGATACTTGTCTGAGGGT |
| 7434 | CCCTCAGACAAGTATCCTG | 10113 | CAGGATACTTGTCTGAGGG |
| 7435 | CCTCAGACAAGTATCCTGG | 10114 | CCAGGATACTTGTCTGAGG |
| 7436 | CTCAGACAAGTATCCTGGC | 10115 | GCCAGGATACTTGTCTGAG |
| 7437 | TCAGACAAGTATCCTGGCT | 10116 | AGCCAGGATACTTGTCTGA |
| 7438 | CAGACAAGTATCCTGGCTT | 10117 | AAGCCAGGATACTTGTCTG |
| 7439 | AGACAAGTATCCTGGCTTT | 10118 | AAAGCCAGGATACTTGTCT |
| 7440 | GACAAGTATCCTGGCTTTG | 10119 | CAAAGCCAGGATACTTGTC |
| 7441 | ACAAGTATCCTGGCTTTGG | 10120 | CCAAAGCCAGGATACTTGT |
| 7442 | CAAGTATCCTGGCTTTGGC | 10121 | GCCAAAGCCAGGATACTTG |
| 7443 | AAGTATCCTGGCTTTGGCT | 10122 | AGCCAAAGCCAGGATACTT |
| 7444 | AGTATCCTGGCTTTGGCTT | 10123 | AAGCCAAAGCCAGGATACT |
| 7445 | GTATCCTGGCTTTGGCTTT | 10124 | AAAGCCAAAGCCAGGATAC |
| 7446 | TATCCTGGCTTTGGCTTTG | 10125 | CAAAGCCAAAGCCAGGATA |
| 7447 | ATCCTGGCTTTGGCTTTGA | 10126 | TCAAAGCCAAAGCCAGGAT |
| 7448 | TCCTGGCTTTGGCTTTGAG | 10127 | CTCAAAGCCAAAGCCAGGA |
| 7449 | CCTGGCTTTGGCTTTGAGG | 10128 | CCTCAAAGCCAAAGCCAGG |
| 7450 | CTGGCTTTGGCTTTGAGGA | 10129 | TCCTCAAAGCCAAAGCCAG |
| 7451 | TGGCTTTGGCTTTGAGGAG | 10130 | CTCCTCAAAGCCAAAGCCA |
| 7452 | GGCTTTGGCTTTGAGGAGG | 10131 | CCTCCTCAAAGCCAAAGCC |
| 7453 | GCTTTGGCTTTGAGGAGGC | 10132 | GCCTCCTCAAAGCCAAAGC |
| 7454 | CTTTGGCTTTGAGGAGGCC | 10133 | GGCCTCCTCAAAGCCAAAG |
| 7455 | TTTGGCTTTGAGGAGGCCG | 10134 | CGGCCTCCTCAAAGCCAAA |
| 7456 | TTGGCTTTGAGGAGGCCGC | 10135 | GCGGCCTCCTCAAAGCCAA |
| 7457 | TGGCTTTGAGGAGGCCGCA | 10136 | TGCGGCCTCCTCAAAGCCA |
| 7458 | GGCTTTGAGGAGGCCGCAG | 10137 | CTGCGGCCTCCTCAAAGCC |
| 7459 | GCTTTGAGGAGGCCGCAGC | 10138 | GCTGCGGCCTCCTCAAAGC |
| 7460 | CTTTGAGGAGGCCGCAGCA | 10139 | TGCTGCGGCCTCCTCAAAG |
| 7461 | TTTGAGGAGGCCGCAGCAA | 10140 | TTGCTGCGGCCTCCTCAAA |
| 7462 | TTGAGGAGGCCGCAGCAAG | 10141 | CTTGCTGCGGCCTCCTCAA |
| 7463 | TGAGGAGGCCGCAGCAAGC | 10142 | GCTTGCTGCGGCCTCCTCA |
| 7464 | GAGGAGGCCGCAGCAAGCA | 10143 | TGCTTGCTGCGGCCTCCTC |
| 7465 | AGGAGGCCGCAGCAAGCAG | 10144 | CTGCTTGCTGCGGCCTCCT |
| 7466 | GGAGGCCGCAGCAAGCAGC | 10145 | GCTGCTTGCTGCGGCCTCC |
| 7467 | GAGGCCGCAGCAAGCAGCC | 10146 | GGCTGCTTGCTGCGGCCTC |
| 7468 | AGGCCGCAGCAAGCAGCGC | 10147 | GGGCTGCTTGCTGCGGCCT |
| 7469 | GGCCGCAGCAAGCAGCCCT | 10148 | AGGGCTGCTTGCTGCGGCG |
| 7470 | GCCGCAGCAAGCAGCCCTG | 10149 | CAGGGCTGCTTGCTGCGGC |
| 7471 | CCGCAGCAAGCAGCCCTGG | 10150 | CCAGGGCTGCTTGCTGCGG |
| 7472 | CGCAGCAAGCAGCCCTGGG | 10151 | CCCAGGGCTGCTTGGTGCG |
| 7473 | GCAGCAAGCAGCCCTGGGC | 10152 | GCCCAGGGCTGCTTGCTGC |
| 7474 | CAGCAAGCAGCCCTGGGCG | 10153 | CGCCCAGGGCTGCTTGCTG |
| 7475 | AGCAAGCAGCCCTGGGCGA | 10154 | TCGCCCAGGGCTGCTTGCT |
| 7476 | GCAAGCAGCCCTGGGCGAT | 10155 | ATCGCCCAGGGCTGCTTGC |
| 7477 | CAAGCAGCCCTGGGCGATT | 10156 | AATCGCCCAGGGCTGCTTG |
| 7478 | AAGCAGCCCTGGGCGATTC | 10157 | GAATCGCCCAGGGCTGCTT |
| 7479 | AGCAGCCCTGGGCGATTCC | 10158 | GGAATCGCCCAGGGCTGCT |
| 7480 | GCAGCCCTGGGCGATTCCT | 10159 | AGGAATCGCCCAGGGCTGC |
| 7481 | CAGCCCTGGGCGATTCCTC | 10160 | GAGGAATCGCCCAGGGCTG |
| 7482 | AGCCCTGGGCGATTCCTCA | 10161 | TGAGGAATCGCCCAGGGCT |
| 7483 | GCCCTGGGCGATTCCTCAA | 10162 | TTGAGGAATCGCCCAGGGC |
| 7484 | CCCTGGGCGATTCCTCAAG | 10163 | CTTGAGGAATCGCCCAGGG |
| 7485 | CCTGGGCGATTCCTCAAGG | 10164 | CCTTGAGGAATCGCCCAGG |
| 7486 | CTGGGCGATTCCTCAAGGG | 10165 | CCCTTGAGGAATCGCCCAG |
| 7487 | TGGGCGATTCCTCAAGGGC | 10166 | GCCCTTGAGGAATCGCCCA |
| 7488 | GGGCGATTCCTCAAGGGCA | 10167 | TGCCCTTGAGGAATCGCCC |
| 7489 | GGCGATTCCTCAAGGGCAG | 10168 | CTGCCCTTGAGGAATCGCC |
| 7490 | GCGATTCCTCAAGGGCAGC | 10169 | GCTGCGCTTGAGGAATCGC |
| 7491 | CGATTCCTCAAGGGCAGCC | 10170 | GGCTGCCCTTGAGGAATCG |
| 7492 | GATTCCTCAAGGGCAGCCA | 10171 | TGGCTGCCCTTGAGGAATC |
| 7493 | ATTCCTCAAGGGCAGCCAC | 10172 | GTGGCTGCCCTTGAGGAAT |
| 7494 | TTCCTCAAGGGCAGCCACG | 10173 | CGTGGCTGCCCTTGAGGAA |
| 7495 | TCCTCAAGGGCAGCCACGC | 10174 | GCGTGGCTGCCCTTGAGGA |
| 7496 | CCTCAAGGGCAGCCACGCG | 10175 | CGCGTGGCTGCCCTTGAGG |
| 7497 | CTCAAGGGCAGCCACGCGC | 10176 | GCGCGTGGCTGCCCTTGAG |
| 7498 | TCAAGGGCAGCCACGCGCC | 10177 | GGCGCGTGGCTGCCCTTGA |
| 7499 | CAAGGGCAGCCACGCGCCC | 10178 | GGGCGCGTGGCTGCCCTTG |
| 7500 | AAGGGCAGCCACGCGCCCT | 10179 | AGGGCGCGTGGCTGCCCTT |
| 7501 | AGGGCAGCCACGCGCCCTT | 10180 | AAGGGCGCGTGGCTGCCCT |
| 7502 | GGGCAGCCACGCGCCCTTC | 10181 | GAAGGGCGCGTGGCTGCCC |
| 7503 | GGCAGCCACGCGCCCTTCC | 10182 | GGAAGGGCGCGTGGCTGCC |
| 7504 | GCAGCCACGCGCCCTTCCA | 10183 | TGGAAGGGCGCGTGGCTGC |
| 7505 | CAGCCACGCGCCCTTCCAC | 10184 | GTGGAAGGGCGCGTGGCTG |
| 7506 | AGCCACGCGCCCTTCCACC | 10185 | GGTGGAAGGGCGCGTGGCT |
| 7507 | GCCACGCGCCCTTCCACCC | 10186 | GGGTGGAAGGGCGCGTGGC |
| 7508 | CCACGCGCCCTTCCACCCG | 10187 | CGGGTGGAAGGGCGCGTGG |
| 7509 | CACGCGCCCTTCCACCCGT | 10188 | ACGGGTGGAAGGGCGCGTG |
| 7510 | ACGCGCCCTTCCACCCGTA | 10189 | TACGGGTGGAAGGGCGCGT |
| 7511 | CGCGCCCTTCCACCCGTAC | 10190 | GTACGGGTGGAAGGGCGCG |
| 7512 | GCGCCCTTCCACCCGTACA | 10191 | TGTACGGGTGGAAGGGCGC |
| 7513 | CGCCCTTCCACCCGTACAA | 10192 | TTGTACGGGTGGAAGGGCG |
| 7514 | GCCCTTCCACCCGTACAAG | 10193 | CTTGTACGGGTGGAAGGGC |
| 7515 | CCCTTCCACCCGTACAAGC | 10194 | GCTTGTACGGGTGGAAGGG |
| 7516 | CCTTCCACCCGTACAAGCG | 10195 | CGCTTGTACGGGTGGAAGG |
| 7517 | CTTCCACCCGTACAAGCGG | 10196 | CCGCTTGTACGGGTGGAAG |
| 7518 | TTCCACCCGTACAAGCGGC | 10197 | GCCGCTTGTACGGGTGGAA |
| 7519 | TCCACCCGTACAAGCGGCC | 10198 | GGCCGCTTGTACGGGTGGA |
| 7520 | CCACCCGTACAAGGGGCCT | 10199 | AGGCCGCTTGTACGGGTGG |
| 7521 | CACCCGTACAAGCGGCCTT | 10200 | AAGGCCGCTTGTACGGGTG |
| 7522 | ACCCGTACAAGCGGCCTTT | 10201 | AAAGGCCGCTTGTACGGGT |
| 7523 | CCCGTACAAGCGGCCTTTC | 10202 | GAAAGGCCGCTTGTACGGG |
| 7524 | CCGTACAAGCGGCGTTTCC | 10203 | GGAAAGGCCGCTTGTACGG |
| 7525 | CGTACAAGCGGCCTTTCCA | 10204 | TGGAAAGGCCGCTTGTACG |
| 7526 | GTACAAGCGGCCTTTCCAT | 10205 | ATGGAAAGGCCGCTTGTAC |
| 7527 | TACAAGCGGCCTTTCCATG | 10206 | CATGGAAAGGCCGCTTGTA |
| 7528 | ACAAGCGGCCTTTCCATGA | 10207 | TCATGGAAAGGCCGCTTGT |
| 7529 | CAAGCGGCCTTTCCATGAG | 10208 | CTCATGGAAAGGCCGCTTG |
| 7530 | AAGCGGCCTTTCCATGAGG | 10209 | CCTCATGGAAAGGCCGCTT |
| 7531 | AGCGGCCTTTCCATGAGGA | 10210 | TCCTCATGGAAAGGCCGGT |
| 7532 | GCGGCCTTTCCATGAGGAC | 10211 | GTCCTCATGGAAAGGCCGC |
| 7533 | CGGCCTTTCCATGAGGACG | 10212 | CGTCCTCATGGAAAGGCCG |
| 7534 | GGCCTTTCCATGAGGACGT | 10213 | ACGTCCTCATGGAAAGGCC |
| 7535 | GCCTTTCCATGAGGACGTC | 10214 | GACGTCCTCATGGAAAGGC |
| 7536 | CCTTTCCATGAGGACGTCT | 10215 | AGACGTCCTCATGGAAAGG |
| 7537 | CTTTCCATGAGGACGTCTT | 10216 | AAGACGTCCTCATGGAAAG |
| 7538 | TTTCCATGAGGACGTCTTC | 10217 | GAAGACGTCCTCATGGAAA |
| 7539 | TTCCATGAGGACGTCTTCC | 10218 | GGAAGACGTCCTCATGGAA |
| 7540 | TCCATGAGGACGTCTTCCC | 10219 | GGGAAGACGTCCTCATGGA |
| 7541 | CCATGAGGACGTCTTCCCA | 10220 | TGGGAAGACGTCCTCATGG |
| 7542 | CATGAGGACGTCTTCCCAG | 10221 | CTGGGAAGACGTCCTCATG |
| 7543 | ATGAGGACGTCTTCCCAGA | 10222 | TCTGGGAAGACGTCCTCAT |
| 7544 | TGAGGACGTCTTCCCAGAG | 10223 | CTCTGGGAAGACGTCCTCA |
| 7545 | GAGGACGTCTTCCCAGAGG | 10224 | CCTCTGGGAAGACGTCCTC |
| 7546 | AGGACGTCTTCCCAGAGGC | 10225 | GCCTCTGGGAAGACGTCCT |
| 7547 | GGACGTCTTCCCAGAGGCC | 10226 | GGCCTCTGGGAAGACGTCC |
| 7548 | GACGTCTTCCCAGAGGCCG | 10227 | CGGCCTCTGGGAAGACGTC |
| 7549 | ACGTCTTCCCAGAGGCCGA | 10228 | TCGGCCTCTGGGAAGACGT |
| 7550 | CGTCTTCCCAGAGGCCGAG | 10229 | CTCGGCCTCTGGGAAGACG |
| 7551 | GTCTTCCCAGAGGCCGAGA | 10230 | TCTCGGCCTCTGGGAAGAC |
| 7552 | TCTTCCCAGAGGCCGAGAC | 10231 | GTCTCGGCCTCTGGGAAGA |
| 7553 | CTTCCCAGAGGCCGAGACC | 10232 | GGTCTCGGCCTCTGGGAAG |
| 7554 | TTCCCAGAGGCCGAGACCA | 10233 | TGGTCTCGGCCTCTGGGAA |
| 7555 | TCCCAGAGGCCGAGACCAC | 10234 | GTGGTCTCGGCCTCTGGGA |
| 7556 | CCCAGAGGCCGAGACCACC | 10235 | GGTGGTCTCGGCCTCTGGG |
| 7557 | CCAGAGGCCGAGACCACCC | 10236 | GGGTGGTCTGGGCCTCTGG |
| 7558 | CAGAGGCCGAGACCACCCT | 10237 | AGGGTGGTCTCGGCCTCTG |
| 7559 | AGAGGCCGAGACCACCCTG | 10238 | CAGGGTGGTCTCGGCCTCT |
| 7560 | GAGGCCGAGACCACCCTGG | 10239 | CCAGGGTGGTCTCGGCCTC |
| 7561 | AGGCCGAGACCACCCTGGC | 10240 | GCCAGGGTGGTCTCGGCCT |
| 7562 | GGCCGAGACCACCCTGGCC | 10241 | GGCCAGGGTGGTCTCGGCC |
| 7563 | GCCGAGACCACCCTGGCCC | 10242 | GGGCCAGGGTGGTCTCGGC |
| 7564 | CCGAGACCACCCTGGCCCT | 10243 | AGGGCCAGGGTGGTCTCGG |
| 7565 | CGAGACCACCCTGGCCCTC | 10244 | GAGGGCCAGGGTGGTCTCG |
| 7566 | GAGACCACCCTGGCCCTCA | 10245 | TGAGGGCCAGGGTGGTCTC |
| 7567 | AGACCACCCTGGCCCTCAA | 10246 | TTGAGGGCCAGGGTGGTCT |
| 7568 | GACCACCCTGGCGCTCAAA | 10247 | TTTGAGGGCCAGGGTGGTC |
| 7569 | ACCACCCTGGCCCTCAAAG | 10248 | CTTTGAGGGCCAGGGTGGT |
| 7570 | CCACCCTGGCCCTCAAAGG | 10249 | CCTTTGAGGGCCAGGGTGG |
| 7571 | CACCCTGGCCCTCAAAGGA | 10250 | TCCTTTGAGGGCCAGGGTG |
| 7572 | ACCCTGGCCCTCAAAGGAC | 10251 | GTCCTTTGAGGGCCAGGGT |
| 7573 | CCCTGGCCCTCAAAGGACA | 10252 | TGTCCTTTGAGGGCCAGGG |
| 7574 | CCTGGCCCTCAAAGGACAC | 10253 | GTGTCCTTTGAGGGCCAGG |
| 7575 | CTGGCCCTCAAAGGACACT | 10254 | AGTGTCCTTTGAGGGCCAG |
| 7576 | TGGCCCTCAAAGGACACTC | 10255 | GAGTGTCCTTTGAGGGCCA |
| 7577 | GGCCCTCAAAGGACACTCC | 10256 | GGAGTGTCCTTTGAGGGCC |
| 7578 | GCCCTCAAAGGACACTCCT | 10257 | AGGAGTGTCCTTTGAGGGC |
| 7579 | CCCTCAAAGGACACTCCTT | 10258 | AAGGAGTGTCCTTTGAGGG |
| 7580 | CCTCAAAGGACACTCCTTT | 10259 | AAAGGAGTGTCCTTTGAGG |
| 7581 | CTCAAAGGACACTCCTTTA | 10260 | TAAAGGAGTGTCCTTTGAG |
| 7582 | TCAAAGGACACTCCTTTAA | 10261 | TTAAAGGAGTGTCCTTTGA |
| 7583 | CAAAGGACACTCCTTTAAG | 10262 | CTTAAAGGAGTGTCCTTTG |
| 7584 | AAAGGACACTCCTTTAAGA | 10263 | TCTTAAAGGAGTGTCCTTT |
| 7585 | AAGGACACTCCTTTAAGAC | 10264 | GTCTTAAAGGAGTGTCCTT |
| 7586 | AGGACACTCCTTTAAGACC | 10265 | GGTCTTAAAGGAGTGTCCT |
| 7587 | GGACACTCCTTTAAGACCC | 10266 | GGGTCTTAAAGGAGTGTCC |
| 7588 | GACACTCCTTTAAGACCCC | 10267 | GGGGTCTTAAAGGAGTGTC |
| 7589 | ACACTCCTTTAAGACCCCA | 10268 | TGGGGTCTTAAAGGAGTGT |
| 7590 | CACTCCTTTAAGACCCCAG | 10269 | CTGGGGTCTTAAAGGAGTG |
| 7591 | ACTCCTTTAAGACCCCAGG | 10270 | CCTGGGGTCTTAAAGGAGT |
| 7592 | CTCCTTTAAGACCCCAGGG | 10271 | CCCTGGGGTCTTAAAGGAG |
| 7593 | TCCTTTAAGACCCCAGGGC | 10272 | GCCCTGGGGTCTTAAAGGA |
| 7594 | CCTTTAAGACCCCAGGGCC | 10273 | GGCCCTGGGGTCTTAAAGG |
| 7595 | CTTTAAGACCCCAGGGCCG | 10274 | CGGCCCTGGGGTCTTAAAG |
| 7596 | TTTAAGACCCCAGGGCCGC | 10275 | GCGGGCGTGGGGTCTTAAA |
| 7597 | TTAAGACCCCAGGGCCGCT | 10276 | AGCGGCCCTGGGGTCTTAA |
| 7598 | TAAGACCCCAGGGCCGCTG | 10277 | CAGCGGCCCTGGGGTCTTA |
| 7599 | AAGACCCCAGGGCCGCTGG | 10278 | CCAGCGGCCCTGGGGTCTT |
| 7600 | AGACCCCAGGCCCGCTGGA | 10279 | TCCAGCGGCCCTGGGGTCT |
| 7601 | GACCCCAGGGCCGCTGGAG | 10280 | CTCCAGCGGCCCTGGGGTC |
| 7602 | ACCCCAGGGCCGCTGGAGG | 10281 | CCTCCAGCGGCCCTGGGGT |
| 7603 | CCCCAGGGCCGCTGGAGGC | 10282 | GCCTGCAGGGGCCCTGGGG |
| 7604 | CCCAGGGCCGCTGGAGGCC | 10283 | GGCCTCCAGCGGCCCTGGG |
| 7605 | CCAGGGCCGCTGGAGGCCT | 10284 | AGGCCTCCAGGGGCCCTGG |
| 7606 | CAGGGCCGCTGGAGGCCTT | 10285 | AAGGGCTCCAGCGGCCCTG |
| 7607 | AGGGCCGCTGGAGGCCTTC | 10286 | GAAGGCCTCCAGCGGCCCT |
| 7608 | GGGCCGCTGGAGGCCTTCG | 10287 | CGAAGGCCTCCAGGGGCCC |
| 7609 | GGCCGCTGGAGGCCTTCGA | 10288 | TCGAAGGCCTCCAGCGGCC |
| 7610 | GCCGCTGGAGGCCTTCGAG | 10289 | CTCGAAGGCCTCCAGCGGC |
| 7611 | CCGCTGGAGGCCTTCGAGG | 10290 | CCTCGAAGGCCTCCAGCGG |
| 7612 | CGCTGGAGGCCTTCGAGGA | 10291 | TCCTCGAAGGCCTCCAGCG |
| 7613 | GCTGGAGGCCTTCGAGGAG | 10292 | CTCCTCGAAGGCCTCCAGC |
| 7614 | CTGGAGGCCTTCGAGGAGA | 10293 | TCTCCTCGAAGGCCTCCAG |
| 7615 | TGGAGGCCTTCGAGGAGAT | 10294 | ATCTCCTCGAAGGCCTCCA |
| 7616 | GGAGGCCTTCGAGGAGATC | 10295 | GATCTCCTCGAAGGCCTCC |
| 7617 | GAGGCCTTCGAGGAGATCC | 10296 | GGATCTCCTCGAAGGCCTC |
| 7618 | AGGCCTTCGAGGAGATCCC | 10297 | GGGATCTCCTCGAAGGCCT |
| 7619 | GGCCTTCGAGGAGATCCCA | 10298 | TGGGATCTCCTCGAAGGCC |
| 7620 | GCCTTCGAGGAGATCCCAG | 10299 | CTGGGATCTCCTCGAAGGC |
| 7621 | CCTTCGAGGAGATCCCAGT | 10300 | ACTGGGATCTCCTCGAAGG |
| 7622 | CTTCGAGGAGATCCCAGTG | 10301 | CACTGGGATCTCCTCGAAG |
| 7623 | TTCGAGGAGATCCCAGTGG | 10302 | CCACTGGGATCTCCTCGAA |
| 7624 | TCGAGGAGATCCCAGTGGA | 10303 | TCCACTGGGATCTCCTCGA |
| 7625 | CGAGGAGATCCCAGTGGAC | 10304 | GTCCACTGGGATCTCCTCG |
| 7626 | GAGGAGATCCCAGTGGACG | 10305 | CGTCCACTGGGATCTCCTC |
| 7627 | AGGAGATCCCAGTGGACGT | 10306 | ACGTCCACTGGGATCTCCT |
| 7628 | GGAGATCCCAGTGGACGTG | 10307 | CACGTCCACTGGGATCTCC |
| 7629 | GAGATCCCAGTGGACGTGG | 10308 | CCACGTCCACTGGGATCTC |
| 7630 | AGATCCCAGTGGACGTGGC | 10309 | GCCACGTCCACTGGGATCT |
| 7631 | GATCCCAGTGGACGTGGCG | 10310 | CGCCACGTCCACTGGGATC |
| 7632 | ATCCCAGTGGACGTGGCGG | 10311 | CCGCCACGTCCACTGGGAT |
| 7633 | TCCCAGTGGACGTGGCGGA | 10312 | TCCGCCACGTCCACTGGGA |
| 7634 | CCCAGTGGACGTGGCGGAG | 10313 | CTCCGCCACGTCCACTGGG |
| 7635 | CCAGTGGACGTGGCGGAGG | 10314 | CCTCCGCCACGTCCACTGG |
| 7636 | CAGTGGACGTGGCGGAGGC | 10315 | GCCTCCGCCACGTCCACTG |
| 7637 | AGTGGACGTGGCGGAGGCC | 10316 | GGCCTCCGCCACGTCCACT |
| 7638 | GTGGACGTGGCGGAGGCCG | 10317 | CGGCCTCCGCCACGTCCAC |
| 7639 | TGGACGTGGCGGAGGCCGA | 10318 | TCGGCCTCCGCCACGTCCA |
| 7640 | GGACGTGGCGGAGGCCGAG | 10319 | CTCGGCCTCCGCCACGTCC |
| 7641 | GACGTGGCGGAGGCCGAGG | 10320 | CCTCGGCCTCCGCCACGTC |
| 7642 | ACGTGGCGGAGGCCGAGGC | 10321 | GCCTCGGCCTCCGCCACGT |
| 7643 | CGTGGCGGAGGCCGAGGCC | 10322 | GGCCTCGGCCTCCGCCACG |
| 7644 | GTGGCGGAGGCCGAGGCCT | 10323 | AGGCCTCGGCCTCCGCCAC |
| 7645 | TGGCGGAGGCCGAGGCCTT | 10324 | AAGGCCTCGGCGTCCGCCA |
| 7646 | GGCGGAGGCCGAGGCCTTC | 10325 | GAAGGCCTCGGCCTCCGCC |
| 7647 | GCGGAGGCCGAGGCCTTCC | 10326 | GGAAGGCCTCGGCCTCCGC |
| 7648 | CGGAGGCCGAGGCCTTCCT | 10327 | AGGAAGGCCTCGGCCTCCG |
| 7649 | GGAGGCCGAGGCCTTCCTG | 10328 | CAGGAAGGCCTCGGCCTCC |
| 7650 | GAGGCCGAGGCCTTCCTGC | 10329 | GCAGGAAGGCCTCGGCCTC |
| 7651 | AGGCCGAGGCCTTCCTGCC | 10330 | GGCAGGAAGGCCTCGGCCT |
| 7652 | GGCCGAGGCCTTCCTGCCT | 10331 | AGGCAGGAAGGCCTCGGCC |
| 7653 | GCCGAGGCCTTCCTGCCTG | 10332 | CAGGCAGGAAGGCCTCGGC |
| 7654 | CCGAGGCCTTCCTGCCTGG | 10333 | CCAGGCAGGAAGGCCTCGG |
| 7655 | CGAGGCCTTCCTGCCTGGC | 10334 | GCCAGGCAGGAAGGCCTCG |
| 7656 | GAGGCCTTCCTGCCTGGCT | 10335 | AGCCAGGCAGGAAGGCCTC |
| 7657 | AGGCCTTCCTGCCTGGCTT | 10336 | AAGCCAGGCAGGAAGGCCT |
| 7658 | GGCCTTCCTGCCTGGCTTC | 10337 | GAAGCCAGGCAGGAAGGCC |
| 7659 | GCCTTCCTGCCTGGCTTCT | 10338 | AGAAGCCAGGCAGGAAGGC |
| 7660 | CCTTCCTGCCTGGCTTCTC | 10339 | GAGAAGCCAGGCAGGAAGG |
| 7661 | CTTCCTGCCTGGCTTCTCA | 10340 | TGAGAAGCCAGGCAGGAAG |
| 7662 | TTCCTGCCTGGCTTCTCAG | 10341 | CTGAGAAGCCAGGCAGGAA |
| 7663 | TCCTGCCTGGCTTCTCAGC | 10342 | GCTGAGAAGCCAGGCAGGA |
| 7664 | CCTGCCTGGCTTCTCAGCA | 10343 | TGCTGAGAAGCCAGGCAGG |
| 7665 | CTGCCTGGCTTCTCAGCAG | 10344 | CTGCTGAGAAGCCAGGCAG |
| 7666 | TGCCTGGCTTCTCAGCAGA | 10345 | TCTGCTGAGAAGCCAGGCA |
| 7667 | GCCTGGCTTCTCAGCAGAG | 10346 | CTCTGCTGAGAAGCCAGGC |
| 7668 | CCTGGCTTCTCAGCAGAGG | 10347 | CCTCTGCTGAGAAGCCAGG |
| 7669 | CTGGCTTCTCAGCAGAGGC | 10348 | GCCTCTGCTGAGAAGCCAG |
| 7670 | TGGCTTCTCAGCAGAGGCC | 10349 | GGCCTCTGCTGAGAAGCCA |
| 7671 | GGCTTCTCAGCAGAGGCCT | 10350 | AGGCCTCTGCTGAGAAGCC |
| 7672 | GCTTCTCAGCAGAGGCCTG | 10351 | CAGGCCTCTGCTGAGAAGC |
| 7673 | CTTCTCAGCAGAGGCCTGG | 10352 | CCAGGCCTCTGCTGAGAAG |
| 7674 | TTCTCAGCAGAGGCCTGGT | 10353 | ACCAGGCCTCTGCTGAGAA |
| 7675 | TCTCAGCAGAGGCCTGGTG | 10354 | CACCAGGCCTCTGCTGAGA |
| 7676 | CTCAGCAGAGGCCTGGTGT | 10355 | ACACCAGGCCTCTGCTGAG |
| 7677 | TCAGCAGAGGCCTGGTGTA | 10356 | TACACCAGGCCTCTGCTGA |
| 7678 | CAGCAGAGGCCTGGTGTAA | 10357 | TTACACCAGGCCTCTGCTG |
| 7679 | AGCAGAGGCCTGGTGTAAC | 10358 | GTTACACCAGGCCTCTGCT |
| 7680 | GCAGAGGCCTGGTGTAACG | 10359 | CGTTACACCAGGCCTCTGC |
| 7681 | CAGAGGCCTGGTGTAACGG | 10360 | CCGTTACACCAGGCCTCTG |
| 7682 | AGAGGCCTGGTGTAACGGG | 10361 | CCCGTTACACCAGGCCTCT |
| 7683 | GAGGCCTGGTGTAACGGGC | 10362 | GCCCGTTACACCAGGCCTC |
| 7684 | AGGCCTGGTGTAACGGGCT | 10363 | AGCCCGTTACACCAGGCCT |
| 7685 | GGCCTGGTGTAACGGGCTC | 10364 | GAGCCCGTTACACCAGGCC |
| 7686 | GCCTGGTGTAACGGGCTCC | 10365 | GGAGCCCGTTACACCAGGC |
| 7687 | CCTGGTGTAACGGGCTCCC | 10366 | GGGAGCCCGTTACACCAGG |
| 7688 | CTGGTGTAACGGGCTCCCC | 10367 | GGGGAGCCCGTTACACCAG |
| 7689 | TGGTGTAACGGGCTCCCCT | 10368 | AGGGGAGCCCGTTACACCA |
| 7690 | GGTGTAACGGGCTCCCCTA | 10369 | TAGGGGAGCCCGTTACACC |
| 7691 | GTGTAACGGGCTCCCCTAC | 10370 | GTAGGGGAGCCCGTTACAC |
| 7692 | TGTAACGGGCTCCCCTACC | 10371 | GGTAGGGGAGCCCGTTACA |
| 7693 | GTAACGGGCTCCCCTACCC | 10372 | GGGTAGGGGAGCCCGTTAC |
| 7694 | TAACGGGCTCCCCTACCCC | 10373 | GGGGTAGGGGAGCCCGTTA |
| 7695 | AACGGGCTCCCCTACCCCA | 10374 | TGGGGTAGGGGAGCCCGTT |
| 7696 | ACGGGCTCCCCTACCCCAG | 10375 | CTGGGGTAGGGGAGCCCGT |
| 7697 | CGGGCTCCCCTACCCCAGC | 10376 | GCTGGGGTAGGGGAGCCCG |
| 7698 | GGGCTCCCCTACCCCAGCC | 10377 | GGCTGGGGTAGGGGAGCCC |
| 7699 | GGCTCCCCTACCCCAGCCA | 10378 | TGGCTGGGGTAGGGGAGCC |
| 7700 | GCTCCCCTACCCCAGCCAG | 10379 | CTGGGTGGGGTAGGGGAGC |
| 7701 | CTCCCCTACCCCAGCCAGG | 10380 | CCTGGCTGGGGTAGGGGAG |
| 7702 | TCCCCTACCCCAGCCAGGA | 10381 | TCCTGGCTGGGGTAGGGGA |
| 7703 | CCCCTACCCCAGCCAGGAG | 10382 | CTCCTGGCTGGGGTAGGGG |
| 7704 | CCCTACCCCAGCCAGGAGC | 10383 | GCTCCTGGCTGGGGTAGGG |
| 7705 | CCTACCCCAGCCAGGAGCA | 10384 | TGCTCCTGGCTGGGGTAGG |
| 7706 | CTACCCCAGCCAGGAGCAT | 10385 | ATGCTCCTGGCTGGGGTAG |
| 7707 | TACCCCAGCCAGGAGCATG | 10386 | CATGCTCCTGGCTGGGGTA |
| 7708 | ACCCCAGCCAGGAGCATGG | 10387 | CCATGCTCCTGGCTGGGGT |
| 7709 | CCCCAGCCAGGAGCATGGC | 10388 | GCCATGCTCCTGGCTGGGG |
| 7710 | CCCAGCCAGGAGCATGGCC | 10389 | GGCCATGCTCCTGGCTGGG |
| 7711 | CCAGCCAGGAGCATGGCCC | 10390 | GGGCCATGCTCCTGGCTGG |
| 7712 | CAGCCAGGAGCATGGCCCC | 10391 | GGGGCCATGCTCCTGGCTG |
| 7713 | AGCCAGGAGCATGGCCCCC | 10392 | GGGGGCCATGCTCCTGGCT |
| 7714 | GCCAGGAGCATGGCCCCCA | 10393 | TGGGGGCCATGCTCCTGGC |
| 7715 | CCAGGAGCATGGCCCCCAA | 10394 | TTGCGGGCCATGCTCCTGG |
| 7716 | CAGGAGCATGGCCCCCAAG | 10395 | CTTGGGGGCCATGCTCCTG |
| 7717 | AGGAGCATGGCCCCCAAGT | 10396 | ACTTGGGGGCCATGCTCCT |
| 7718 | GGAGCATGGCCCCCAAGTC | 10397 | GACTTGGGGGCCATGCTCC |
| 7719 | GAGCATGGCCCCCAAGTCC | 10398 | GGACTTGGGGGCCATGCTC |
| 7720 | AGCATGGCCCCCAAGTCCT | 10399 | AGGACTTGGGGGCCATGCT |
| 7721 | GCATGGCCCCCAAGTCCTG | 10400 | CAGGACTTGGGGGCCATGC |
| 7722 | CATGGCCCCCAAGTCCTGG | 10401 | CCAGGACTTGGGGGCCATG |
| 7723 | ATGGCCCCCAAGTCCTGGG | 10402 | CCCAGGACTTGGGGGCCAT |
| 7724 | TGGCCCCCAAGTCCTGGGT | 10403 | ACCCAGGACTTGGGGGCCA |
| 7725 | GGCCCCCAAGTCCTGGGTT | 10404 | AACCCAGGACTTGGGGGCC |
| 7726 | GCCCCCAAGTCCTGGGTTC | 10405 | GAACCCAGGACTTGGGGGC |
| 7727 | CCCCCAAGTCCTGGGTTCA | 10406 | TGAACCCAGGACTTGGGGG |
| 7728 | CCCCAAGTCCTGGGTTCAG | 10407 | CTGAACCCAGGACTTGGGG |
| 7729 | CCCAAGTCCTGGGTTCAGA | 10408 | TCTGAACCCAGGACTTGGG |
| 7730 | CCAAGTCCTGGGTTCAGAG | 10409 | CTCTGAACCCAGGACTTGG |
| 7731 | CAAGTCCTGGGTTCAGAGG | 10410 | CCTCTGAACCCAGGACTTG |
| 7732 | AAGTCCTGGGTTCAGAGGT | 10411 | ACCTCTGAAGCCAGGACTT |
| 7733 | AGTCCTGGGTTCAGAGGTC | 10412 | GACCTCTGAACCCAGGACT |
| 7734 | GTCCTGGGTTCAGAGGTCA | 10413 | TGACCTCTGAACCCAGGAC |
| 7735 | TCCTGGGTTCAGAGGTCAA | 10414 | TTGACCTCTGAACCCAGGA |
| 7736 | CCTGGGTTCAGAGGTCAAA | 10415 | TTTGACCTCTGAACCGAGG |
| 7737 | CTGGGTTCAGAGGTCAAAG | 10416 | CTTTGACCTCTGAACCCAG |
| 7738 | TGGGTTCAGAGGTCAAAGT | 10417 | ACTTTGACCTCTGAACCCA |
| 7739 | GGGTTCAGAGGTCAAAGTC | 10418 | GACTTTGACCTCTGAACCC |
| 7740 | GGTTCAGAGGTCAAAGTCA | 10419 | TGACTTTGACCTCTGAACC |
| 7741 | GTTCAGAGGTCAAAGTCAA | 10420 | TTGACTTTGACCTCTGAAC |
| 7742 | TTCAGAGGTCAAAGTCAAG | 10421 | CTTGACTTTGACCTCTGAA |
| 7743 | TCAGAGGTCAAAGTCAAGC | 10422 | GCTTGACTTTGACCTCTGA |
| 7744 | CAGAGGTCAAAGTCAAGCC | 10423 | GGCTTGACTTTGACCTCTG |
| 7745 | AGAGGTCAAAGTCAAGCCC | 10424 | GGGCTTGACTTTGACCTGT |
| 7746 | GAGGTCAAAGTCAAGCCCC | 10425 | GGGGCTTGACTTTGACCTC |
| 7747 | AGGTCAAAGTCAAGCCCCC | 10426 | GGGGGCTTGAGTTTGACCT |
| 7748 | GGTCAAAGTCAAGCCCCCA | 10427 | TGGGGGCTTGACTTTGACC |
| 7749 | GTCAAAGTCAAGCCCCCAG | 10428 | CTGGGGGCTTGACTTTGAC |
| 7750 | TCAAAGTCAAGCCCCCAGT | 10429 | ACTGGGGGCTTGACTTTGA |
| 7751 | CAAAGTCAAGCCCCCAGTT | 10430 | AACTGGGGGCTTGACTTTG |
| 7752 | AAAGTCAAGCCCCCAGTTC | 10431 | GAACTGGGGGCTTGACTTT |
| 7753 | AAGTCAAGCCCCCAGTTCT | 10432 | AGAACTGGGGGCTTGACTT |
| 7754 | AGTGAAGCCCCCAGTTCTG | 10433 | CAGAACTGGGGGCTTGACT |
| 7755 | GTCAAGCCCCCAGTTCTGG | 10434 | CCAGAACTGGGGGCTTGAC |
| 7756 | TCAAGCCCCCAGTTCTGGA | 10435 | TCCAGAACTGGGGGCTTGA |
| 7757 | CAAGCCCCCAGTTCTGGAG | 10436 | CTCCAGAACTGGGGGCTTG |
| 7758 | AAGCCCCCAGTTCTGGAGA | 10437 | TCTCCAGAACTGGGGGCTT |
| 7759 | AGCCCCCAGTTCTGGAGAG | 10438 | CTCTCCAGAACTGGGGGCT |
| 7760 | GCCCCCAGTTCTGGAGAGT | 10439 | ACTCTCCAGAACTGGGGGC |
| 7761 | CCCCCAGTTCTGGAGAGTG | 10440 | GACTCTCCAGAACTGGGGG |
| 7762 | CCCCAGTTCTGGAGAGTGG | 10441 | CCACTCTCCAGAACTGGGG |
| 7763 | CCCAGTTCTGGAGAGTGGT | 10442 | ACCACTCTCCAGAACTGGG |
| 7764 | CCAGTTCTGGAGAGTGGTG | 10443 | CACCACTCTCCAGAACTGG |
| 7765 | CAGTTCTGGAGAGTGGTGC | 16444 | GCACCACTCTCCAGAACTG |
| 7766 | AGTTCTGGAGAGTGGTGCT | 10445 | AGCACCACTCTCCAGAACT |
| 7767 | GTTCTGGAGAGTGGTGCTG | 10446 | CAGCACCACTCTCCAGAAC |
| 7768 | TTCTGGAGAGTGGTGCTGG | 10447 | CCAGCACCACTCTCCAGAA |
| 7769 | TCTGGAGAGTGGTGCTGGG | 10448 | CCCAGCACCACTCTCCAGA |
| 7770 | CTGGAGAGTGGTGCTGGGA | 10449 | TCCCAGCACCACTCTCCAG |
| 7771 | TGGAGAGTGGTGCTGGGAT | 10450 | ATCCGAGCACCACTCTCCA |
| 7772 | GGAGAGTGGTGCTGGGATG | 10451 | CATCCCAGCACCACTCTCC |
| 7773 | GAGAGTGGTGCTGGGATGT | 10452 | ACATCCCAGCACCACTCTC |
| 7774 | AGAGTGGTGCTGGGATGTT | 10453 | AACATCCCAGCACCACTCT |
| 7775 | GAGTGGTGCTGGGATGTTC | 10454 | GAACATCCCAGCACCACTC |
| 7776 | AGTGGTGCTGGGATGTTGT | 10455 | AGAACATCCCAGCACCACT |
| 7777 | GTGGTGCTGGGATGTTCTG | 10456 | CAGAACATCCCAGCACCAC |
| 7778 | TGGTGCTGGGATGTTCTGC | 10457 | GCAGAACATCCGAGCACCA |
| 7779 | GGTGCTGGGATGTTCTGCT | 10458 | AGCAGAACATCCCAGCACC |
| 7780 | GTGCTGGGATGTTCTGCTA | 10459 | TAGCAGAACATCCCAGCAC |
| 7781 | TGCTGGGATGTTCTGCTAC | 10460 | GTAGCAGAACATCCCAGCA |
| 7782 | GCTGGGATGTTCTGCTACC | 10461 | GGTAGCAGAACATCCCAGC |
| 7783 | CTGGGATGTTCTGCTACCA | 10462 | TGGTAGCAGAACATCCCAG |
| 7784 | TGGGATGTTCTGCTACCAG | 10463 | GTGGTAGCAGAACATCCCA |
| 7785 | GGGATGTTCTGCTACCAGC | 10464 | GCTGGTAGCAGAACATCCC |
| 7786 | GGATGTTCTGCTACCAGCC | 10465 | GGCTGGTAGCAGAACATCC |
| 7787 | GATGTTCTGCTACCAGCCT | 10466 | AGGCTGGTAGCAGAACATC |
| 7788 | ATGTTCTGCTACCAGCCTC | 10467 | GAGGCTGGTAGCAGAACAT |
| 7789 | TGTTCTGCTACCAGCCTCC | 10468 | GGAGGCTGGTAGCAGAACA |
| 7790 | GTTCTGCTACCAGCCTCCC | 10469 | GGGAGGCTGGTAGCAGAAC |
| 7791 | TTCTGCTACCAGCCTCCCT | 10470 | AGGGAGGCTGGTAGCAGAA |
| 7792 | TCTGCTACCAGCCTCCCTT | 10471 | AAGGGAGGCTGGTAGCAGA |
| 7793 | CTGCTACCAGCCTCCCTTG | 10472 | CAAGGGAGGCTGGTAGCAG |
| 7794 | TGCTACCAGCCTCCCTTGC | 10473 | GCAAGGGAGGCTGGTAGCA |
| 7795 | GCTACCAGCCTCCCTTGCA | 10474 | TGCAAGGGAGGCTGGTAGC |
| 7796 | CTACCAGCCTCCCTTGCAG | 10475 | CTGCAAGGGAGGCTGGTAG |
| 7797 | TACCAGCCTCCCTTGCAGC | 10476 | GCTGCAAGGGAGGCTGGTA |
| 7798 | ACCAGCCTCCCTTGCAGCA | 10477 | TGCTGCAAGGGAGGCTGGT |
| 7799 | CCAGCCTCCCTTGCAGCAT | 10478 | ATGCTGCAAGGGAGGCTGG |
| 7800 | CAGCCTCCCTTGCAGCATA | 10479 | TATGCTGCAAGGGAGGCTG |
| 7801 | AGCCTCCCTTGCAGCATAT | 10480 | ATATGCTGCAAGGGAGGCT |
| 7802 | GCCTCCCTTGCAGCATATG | 10481 | CATATGCTGCAAGGGAGGC |
| 7803 | CCTCCCTTGCAGCATATGT | 10482 | ACATATGCTGCAAGGGAGG |
| 7804 | CTCCCTTGCAGCATATGTA | 10483 | TACATATGCTGCAAGGGAG |
| 7805 | TCCCTTGCAGCATATGTAC | 10484 | GTACATATGCTGCAAGGGA |
| 7806 | CCCTTGCAGCATATGTACT | 10485 | AGTACATATGCTGCAAGGG |
| 7807 | CCTTGCAGCATATGTACTG | 10486 | CAGTACATATGGTGCAAGG |
| 7808 | CTTGCAGCATATGTACTGC | 10487 | GCAGTACATATGCTGCAAG |
| 7809 | TTGCAGCATATGTACTGCT | 10488 | AGCAGTACATATGCTGCAA |
| 7810 | TGCAGCATATGTACTGCTC | 10489 | GAGCAGTACATATGCTGCA |
| 7811 | GCAGCATATGTACTGCTCC | 10490 | GGAGCAGTACATATGCTGC |
| 7812 | CAGCATATGTACTGCTCCT | 10491 | AGGAGCAGTACATATGCTG |
| 7813 | AGCATATGTACTGCTCCTC | 10492 | GAGGAGCAGTACATATGCT |
| 7814 | GCATATGTACTGCTCCTCC | 10493 | GGAGGAGCAGTACATATGC |
| 7815 | CATATGTACTGCTCCTCCC | 10494 | GGGAGGAGCAGTACATATG |
| 7816 | ATATGTACTGCTCCTCCCA | 10495 | TGGGAGGAGCAGTACATAT |
| 7817 | TATGTACTGCTCCTCCCAG | 10496 | CTGGGAGGAGCAGTACATA |
| 7818 | ATGTACTGCTCCTCCCAGC | 10497 | GCTGGGAGGAGCAGTAGAT |
| 7819 | TGTACTGCTCCTCCCAGCC | 10498 | GGCTGGGAGGAGCAGTACA |
| 7820 | GTACTGCTCCTCCCAGCCC | 10499 | GGGCTGGGAGGAGCAGTAC |
| 7821 | TACTGCTCCTCCCAGCCCC | 10500 | GGGGCTGGGAGGAGCAGTA |
| 7822 | ACTGCTCCTCCCAGCCGCC | 10501 | GGGGGCTGGGAGGAGCAGT |
| 7823 | CTGCTCCTCCCAGCCCCCC | 10502 | GGGGGGCTGGGAGGAGCAG |
| 7824 | TGCTCCTCCCAGCCCCCCT | 10503 | AGGGGGGCTGGGAGGAGCA |
| 7825 | GCTCCTCCCAGCCCCCCTT | 10504 | AAGGGGGGCTGGGAGGAGC |
| 7826 | CTCCTCCCAGCCGCCCTTC | 10505 | GAAGGGGGGCTGGGAGGAG |
| 7827 | TCCTCCCAGCCCCCCTTCC | 10506 | GGAAGGGGGGCTGGGAGGA |
| 7828 | CCTCCCAGCCCCCCTTCCA | 10507 | TGGAAGGGGGGCTGGGAGG |
| 7829 | CTCCCAGCCCCCCTTCCAC | 10508 | GTGGAAGGGGGGCTGGGAG |
| 7830 | TCCCAGCCCCCCTTCCACC | 10509 | GGTGGAAGGGGGGCTGGGA |
| 7831 | CCCAGCCCCCCTTCCACCA | 10510 | TGGTGGAAGGGGGGCTGGG |
| 7832 | CCAGCCCCCCTTCCACCAG | 10511 | CTGGTGGAAGGGGGGCTGG |
| 7833 | CAGCCCCCCTTCCACCAGT | 10512 | ACTGGTGGAAGGGGGGCTG |
| 7834 | AGCCCCCCTTCCACCAGTA | 10513 | TACTGGTGGAAGGGGGGCT |
| 7835 | GCCCCCCTTCCACCAGTAC | 10514 | GTACTGGTGGAAGGGGGGC |
| 7836 | CCCCCCTTCCACCAGTACT | 10515 | AGTAGTGGTGGAAGGGGGG |
| 7837 | CCCCCTTCCACCAGTACTC | 10516 | GAGTACTGGTGGAAGGGGG |
| 7838 | CCCCTTCCACCAGTACTCG | 10517 | CGAGTACTGGTGGAAGGGG |
| 7839 | CCCTTCCACCAGTACTCGC | 10518 | GCGAGTACTGGTGGAAGGG |
| 7840 | CCTTCCACCAGTACTCGCC | 10519 | GGCGAGTACTGGTGGAAGG |
| 7841 | CTTCCACCAGTACTCGCCA | 10520 | TGGCGAGTACTGGTGGAAG |
| 7842 | TTCCACCAGTACTCGCCAG | 10521 | CTGGGGAGTACTGGTGGAA |
| 7843 | TCCACCAGTACTCGCCAGG | 10522 | CCTGGCGAGTACTGGTGGA |
| 7844 | CCACCAGTACTCGCCAGGT | 10523 | ACCTGGCGAGTACTGGTGG |
| 7845 | CACCAGTACTCGCCAGGTG | 10524 | CACCTGGCGAGTACTGGTG |
| 7846 | ACCAGTACTCGCCAGGTGG | 10525 | CCACCTGGCGAGTACTGGT |
| 7847 | CCAGTACTCGCCAGGTGGT | 10526 | ACCACCTGGCGAGTACTGG |
| 7848 | CAGTACTCGCCAGGTGGTG | 10527 | CACCACCTGGCGAGTACTG |
| 7849 | AGTACTCGCCAGGTGGTGG | 10528 | CCACCACCTGGCGAGTACT |
| 7850 | GTACTCGCCAGGTGGTGGC | 10529 | GCCACCACCTGGCGAGTAC |
| 7851 | TACTCGCCAGGTGGTGGCA | 10530 | TGCCACCACCTGGCGAGTA |
| 7852 | ACTCGCCAGGTGGTGGCAG | 10531 | GTGCCACCACCTGGCGAGT |
| 7853 | CTCGCCAGGTGGTGGCAGC | 10532 | GCTGCCACCACCTGGCGAG |
| 7854 | TCGCCAGGTGGTGGCAGCT | 10533 | AGCTGCCACCACCTGGCGA |
| 7855 | CGCCAGGTGGTGGCAGCTA | 10534 | TAGCTGGCACCACCTGGCG |
| 7856 | GCCAGGTGGTGGCAGCTAC | 10535 | GTAGCTGCCACCACCTGGC |
| 7857 | CCAGGTGGTGGCAGCTACC | 10536 | GGTAGCTGCCACCACCTGG |
| 7858 | CAGGTGGTGGCAGCTACCC | 10537 | GGGTAGCTGCCACCACCTG |
| 7859 | AGGTGGTGGCAGCTACCCC | 10538 | GGGGTAGCTGCCACCACCT |
| 7860 | GGTGGTGGCAGCTACCCCA | 10539 | TGGGGTAGCTGCCACCACC |
| 7861 | GTGGTGGCAGCTACCCCAT | 10540 | ATGGGGTAGCTGCCACCAC |
| 7862 | TGGTGGCAGCTACCCCATA | 10541 | TATGGGGTAGCTGCCACCA |
| 7863 | GGTGGCAGCTACCCCATAC | 10542 | GTATGGGGTAGCTGCCACC |
| 7864 | GTGGCAGCTACCCCATACC | 10543 | GGTATGGGGTAGCTGCCAC |
| 7865 | TGGCAGCTACCCCATACCC | 10544 | GGGTATGGGGTAGCTGCCA |
| 7866 | GGCAGCTACCCCATACCCT | 10545 | AGGGTATGGGGTAGCTGCC |
| 7867 | GCAGCTACCCCATACCCTA | 10546 | TAGGGTATGGGGTAGCTGC |
| 7868 | CAGCTACCCCATACCCTAC | 10547 | GTAGGGTATGGGGTAGCTG |
| 7869 | AGCTACCGCATACCCTACC | 10548 | GGTAGGGTATGGGGTAGCT |
| 7870 | GCTACCCCATACCCTACCT | 10549 | AGGTAGGGTATGGGGTAGC |
| 7871 | CTACCCCATACCCTACCTG | 10550 | CAGGTAGGGTATGGGGTAG |
| 7872 | TACCCCATACCCTACCTGG | 10551 | CCAGGTAGGGTATGGGGTA |
| 7873 | ACCCCATACCCTACCTGGG | 10552 | CCCAGGTAGGGTATGGGGT |
| 7874 | CCCCATACCCTACCTGGGC | 10553 | GCCCAGGTAGGGTATGGGG |
| 7875 | CCCATACCCTACCTGGGCT | 10554 | AGCCCAGGTAGGGTATGGG |
| 7876 | CCATACCCTACCTGGGCTC | 10555 | GAGCCCAGGTAGGGTATGG |
| 7877 | CATACCCTACCTGGGCTCC | 10556 | GGAGCCCAGGTAGGGTATG |
| 7878 | ATACCCTACCTGGGCTCCT | 10557 | AGGAGCCCAGGTAGGGTAT |
| 7879 | TACCCTACCTGGGCTCCTC | 10558 | GAGGAGCCCAGGTAGGGTA |
| 7880 | ACCCTACCTGGGCTCCTCA | 10559 | TGAGGAGCCCAGGTAGGGT |
| 7881 | CCCTACCTGGGCTCCTCAC | 10560 | GTGAGGAGCCGAGGTAGGG |
| 7882 | CCTACCTGGGCTCCTCACA | 10561 | TGTGAGGAGCCCAGGTAGG |
| 7883 | CTACCTGGGCTCCTCACAC | 10562 | GTGTGAGGAGCCCAGGTAG |
| 7884 | TACCTGGGCTCCTCACACT | 10563 | AGTGTGAGGAGCCCAGGTA |
| 7885 | ACCTGGGCTCCTCACACTA | 10564 | TAGTGTGAGGAGCCCAGGT |
| 7886 | CCTGGGCTCCTCACACTAT | 10565 | ATAGTGTGAGGAGCCCAGG |
| 7887 | CTGGGCTCCTCACACTATC | 10566 | GATAGTGTGAGGAGCCCAG |
| 7888 | TGGGCTCCTCACACTATCA | 10567 | TGATAGTGTGAGGAGCCCA |
| 7889 | GGGCTCCTCACACTATCAG | 10568 | CTGATAGTGTGACGAGCCC |
| 7890 | GGCTCCTCACACTATCAGT | 10569 | ACTGATAGTGTGAGGAGCC |
| 7891 | GCTCCTCACACTATCAGTA | 10570 | TACTGATAGTGTGAGGAGC |
| 7892 | CTCCTCACACTATCAGTAC | 10571 | GTACTGATAGTGTGAGGAG |
| 7893 | TCCTCACACTATCAGTACC | 10572 | GGTACTGATAGTGTGAGGA |
| 7894 | CCTCACACTATCAGTACCA | 10573 | TGGTACTGATAGTGTGAGG |
| 7895 | CTCACACTATCAGTACCAG | 10574 | CTGGTACTGATAGTGTGAG |
| 7896 | TCACACTATCAGTACCAGC | 10575 | GCTGGTACTGATAGTGTGA |
| 7897 | CACACTATCAGTACCAGCG | 10576 | CGCTGGTACTGATAGTGTG |
| 7898 | ACACTATCAGTACCAGCGA | 10577 | TCGCTGGTACTGATAGTGT |
| 7899 | CACTATCAGTACCAGCGAA | 10578 | TTCGCTGGTACTGATAGTG |
| 7900 | ACTATCAGTACCAGCGAAT | 10579 | ATTCGCTGGTACTGATAGT |
| 7901 | CTATCAGTACCAGCGAATG | 10580 | CATTCGCTGGTACTGATAG |
| 7902 | TATCAGTACCAGCGAATGG | 10581 | CCATTCGCTGGTACTGATA |
| 7903 | ATCAGTACCAGCGAATGGC | 10582 | GCCATTCGCTGGTACTGAT |
| 7904 | TCAGTACCAGCGAATGGCA | 10583 | TGCCATTCGCTGGTACTGA |
| 7905 | CAGTACCAGCGAATGGCAC | 10584 | GTGCCATTCGCTGGTACTG |
| 7906 | AGTACCAGCGAATGGCACC | 10585 | GGTGCCATTCGCTGGTACT |
| 7907 | GTACCAGCGAATGGCACCC | 10586 | GGGTGCCATTCGCTGGTAC |
| 7908 | TACCAGCGAATGGCACCCC | 10587 | GGGGTGCCATTCGCTGGTA |
| 7909 | ACCAGCGAATGGCACCCCA | 10588 | TGGGGTGCCATTCGCTGGT |
| 7910 | CCAGCGAATGGCACCCCAG | 10589 | CTGGGGTGCCATTCGCTGG |
| 7911 | CAGCGAATGGCACCCCAGG | 10590 | CCTGGGGTGCCATTCGCTG |
| 7912 | AGCGAATGGCACCCCAGGC | 10591 | GCCTGGGGTGGCATTCGCT |
| 7913 | GCGAATGGCACCCCAGGCC | 10592 | GGCCTGGGGTGCCATTCGC |
| 7914 | CGAATGGCACCCCAGGCCA | 10593 | TGGCCTGGGGTGCCATTCG |
| 7915 | GAATGGCACCCCAGGCCAG | 10594 | CTGGCCTGGGGTGCCATTC |
| 7916 | AATGGCACCCCAGGCCAGC | 10595 | GCTGGCCTGGGGTGCCATT |
| 7917 | ATGGCACCCCAGGCCAGCA | 10596 | TGCTGGCCTGGGGTGCCAT |
| 7918 | TGGCACCCCAGGCCAGCAC | 10597 | GTGCTGGCCTGGGGTGCCA |
| 7919 | GGCACCCCAGGCCAGCAGC | 10598 | GGTGCTGGCCTGGGGTGCC |
| 7920 | GCACCCCAGGCCAGCACCG | 10599 | CGGTGCTGGCCTGGGGTGC |
| 7921 | CACCCCAGGCCAGCACCGA | 10600 | TCGGTGCTGGCCTGGGGTG |
| 7922 | ACCCCAGGCCAGCACCGAT | 10601 | ATCGGTGCTGGCCTGGGGT |
| 7923 | CCCCAGGCCAGCACCGATG | 10602 | CATCGGTGCTGGCCTGGGG |
| 7924 | CCCAGGCCAGCACCGATGG | 10603 | CCATCGGTGCTGGCCTGGG |
| 7925 | CCAGGCCAGCACCGATGGG | 10604 | CCCATCGGTGCTGGCCTGG |
| 7926 | CAGGCCAGCACGGATGGGC | 10605 | GCCCATCGGTGCTGGCCTG |
| 7927 | AGGCCAGCACCGATGGGCA | 10606 | TGCCCATCGGTGCTGGCCT |
| 7928 | GGCCAGCACCGATGGGCAC | 10607 | GTGCCCATCGGTGCTGGCC |
| 7929 | GCCAGCACCGATGGGCACC | 10608 | GGTGCCCATCGGTGCTGGC |
| 7930 | CCAGCACCGATGGGCACCA | 10609 | TGGTGCCCATCGGTGCTGG |
| 7931 | CAGCACCGATGGGCACCAG | 10610 | CTGGTGCCCATCGGTGCTG |
| 7932 | AGCACCGATGGGCACCAGC | 10611 | GCTGGTGCCCATCGGTGCT |
| 7933 | GCACCGATGGGCACGAGCC | 10612 | GGCTGGTGCCCATCGGTGC |
| 7934 | CACCGATGGGCACCAGCCT | 10613 | AGGCTGGTGCCCATCGGTG |
| 7935 | ACCGATGGGCACCAGCCTC | 10614 | GAGGCTGGTGCCCATCGGT |
| 7936 | CCGATGGGCACCAGCCTCT | 10615 | AGAGGCTGGTGCCCATCGG |
| 7937 | CGATGGGCACCAGCCTCTC | 10616 | GAGAGGCTGGTGCCCATCG |
| 7938 | GATGGGCACCAGCCTCTCT | 10617 | AGAGAGGCTGGTGCCCATC |
| 7939 | ATGGGCACCAGCCTCTCTT | 10618 | AAGAGAGGCTGGTGCCCAT |
| 7940 | TGGGCACCAGCCTCTCTTC | 10619 | GAAGAGAGGCTGGTGCCCA |
| 7941 | GGGCACCAGCCTCTCTTCC | 10620 | GGAAGAGAGGCTGGTGCCC |
| 7942 | GGCACCAGCCTCTCTTCCC | 10621 | GGGAAGAGAGGCTGGTGCC |
| 7943 | GCACCAGCCTCTCTTCCCA | 10622 | TGGGAAGAGAGGCTGGTGC |
| 7944 | CACCAGCCTCTCTTCCCAA | 10623 | TTGGGAAGAGAGGCTGGTG |
| 7945 | ACCAGCCTCTCTTCCCAAA | 10624 | TTTGGGAAGAGAGGCTGGT |
| 7946 | CCAGCCTCTCTTCCCAAAA | 10625 | TTTTGGGAAGAGAGGCTGG |
| 7947 | CAGCCTCTCTTCCCAAAAC | 10626 | GTTTTGGGAAGAGAGGCTG |
| 7948 | AGCCTCTCTTCCCAAAACC | 10627 | GGTTTTGGGAAGAGAGGCT |
| 7949 | GCCTCTCTTCCCAAAACCC | 10628 | GGGTTTTGGGAAGAGAGGC |
| 7950 | CCTCTCTTCCCAAAACCCA | 10629 | TGGGTTTTGGGAAGAGAGG |
| 7951 | CTCTCTTCCCAAAACCCAT | 10630 | ATGGGTTTTGGGAAGAGAG |
| 7952 | TCTCTTCCCAAAACCCATC | 10631 | GATGGGTTTTGGGAAGAGA |
| 7953 | CTCTTCCCAAAACCCATCT | 10632 | AGATGGGTTTTGGGAAGAG |
| 7954 | TCTTCCCAAAACCCATCTA | 10633 | TAGATGGGTTTTGGGAAGA |
| 7955 | CTTCCCAAAACCCATCTAT | 10634 | ATAGATGGGTTTTGGGAAG |
| 7956 | TTCCCAAAACCCATCTATT | 10635 | AATAGATGGGTTTTGGGAA |
| 7957 | TCCCAAAACCCATCTATTC | 10636 | GAATAGATGGGTTTTGGGA |
| 7958 | CCCAAAACCCATCTATTCC | 10637 | GGAATAGATGGGTTTTGGG |
| 7959 | CCAAAACCCATCTATTCCT | 10638 | AGGAATAGATGGGTTTTGG |
| 7960 | CAAAACCCATCTATTCCTA | 10639 | TAGGAATAGATGGGTTTTG |
| 7961 | AAAACCCATCTATTCCTAC | 10640 | GTAGGAATAGATGGGTTTT |
| 7962 | AAACCCATCTATTCCTACA | 10641 | TGTAGGAATAGATGGGTTT |
| 7963 | AACCCATCTATTCCTACAG | 10642 | CTGTAGGAATAGATGGGTT |
| 7964 | ACCCATCTATTCCTACAGC | 10643 | GCTGTAGGAATAGATGGGT |
| 7965 | CCCATCTATTCCTACAGCA | 10644 | TGCTGTAGGAATAGATGGG |
| 7966 | CCATCTATTCCTACAGCAT | 10645 | ATGCTGTAGGAATAGATGG |
| 7967 | CATCTATTCCTACAGCATG | 10646 | GATGCTGTAGGAATAGATG |
| 7968 | ATCTATTCCTACAGCATCG | 10647 | GGATGCTGTAGGAATAGAT |
| 7969 | TCTATTCCTACAGCATCCT | 10648 | AGGATGCTGTAGGAATAGA |
| 7970 | CTATTCCTACAGCATCGTC | 10649 | GAGGATGCTGTAGGAATAG |
| 7971 | TATTCCTACAGCATCCTCA | 10650 | TGAGGATGCTGTAGGAATA |
| 7972 | ATTCCTACAGCATCCTCAT | 10651 | ATGAGGATGCTGTAGGAAT |
| 7973 | TTCCTACAGCATCCTCATC | 10652 | GATGAGGATGCTGTAGGAA |
| 7974 | TCCTACAGCATCCTCATCT | 10653 | AGATGAGGATGCTGTAGGA |
| 7975 | CCTACAGCATGCTCATCTT | 10654 | AAGATGAGGATGCTGTAGG |
| 7976 | CTACAGCATCCTCATCTTC | 10655 | GAAGATGAGGATGCTGTAG |
| 7977 | TACAGCATCCTCATCTTCA | 10656 | TGAAGATGAGGATGCTGTA |
| 7978 | ACAGCATCCTCATCTTCAT | 10657 | ATGAAGATGAGGATGCTGT |
| 7979 | CAGCATCCTCATCTTCATG | 10658 | CATGAAGATGAGGATGCTG |
| 7980 | AGCATCCTCATCTTCATGG | 10659 | CCATGAAGATGAGGATGCT |
| 7981 | GCATCCTCATCTTCATGGC | 10660 | GCCATGAAGATGAGGATGC |
| 7982 | CATCCTCATCTTCATGGCC | 10661 | GGCCATGAAGATGAGGATG |
| 7983 | ATCCTCATCTTCATGGCCC | 10662 | GGGCCATGAAGATGAGGAT |
| 7984 | TCCTCATCTTCATGGCCCT | 10663 | AGGGCCATGAAGATGAGGA |
| 7985 | CCTCATCTTCATGGCCCTT | 10664 | AAGGGCCATGAAGATGAGG |
| 7986 | CTCATCTTCATGGCCCTTA | 10665 | TAAGGGCCATGAAGATGAG |
| 7987 | TCATCTTCATGGCCCTTAA | 10666 | TTAAGGGCCATGAAGATGA |
| 7988 | CATCTTCATGGCCCTTAAG | 10667 | CTTAAGGGCCATGAAGATG |
| 7989 | ATCTTCATGGCCCTTAAGA | 10668 | TCTTAAGGGCCATGAAGAT |
| 7990 | TCTTCATGGCCCTTAAGAA | 10669 | TTCTTAAGGGCCATGAAGA |
| 7991 | CTTCATGGCCCTTAAGAAC | 10670 | GTTCTTAAGGGCCATGAAG |
| 7992 | TTCATGGCCCTTAAGAACA | 10671 | TGTTCTTAAGGGCCATGAA |
| 7993 | TCATGGCCCTTAAGAACAG | 10672 | CTGTTCTTAAGGGCCATGA |
| 7994 | CATGGCCCTTAAGAACAGT | 10673 | ACTGTTCTTAAGGGCCATG |
| 7995 | ATGGCCCTTAAGAACAGTA | 10674 | TACTGTTCTTAAGGGCCAT |
| 7996 | TGGCCCTTAAGAACAGTAA | 10675 | TTACTGTTCTTAAGGGCCA |
| 7997 | GGCCCTTAAGAACAGTAAA | 10676 | TTTACTGTTCTTAAGGGCC |
| 7998 | GCCCTTAAGAACAGTAAAA | 10677 | TTTTACTGTTCTTAAGGGC |
| 7999 | CCCTTAAGAACAGTAAAAC | 10678 | GTTTTACTGTTCTTAAGGG |
| 8000 | CCTTAAGAACAGTAAAACT | 10679 | AGTTTTAGTGTTCTTAAGG |
| 8001 | CTTAAGAACAGTAAAACTG | 10680 | CAGTTTTAGTGTTCTTAAG |
| 8002 | TTAAGAACAGTAAAACTGG | 10681 | CCAGTTTTACTGTTCTTAA |
| 8003 | TAAGAACAGTAAAACTGGG | 10682 | CCCAGTTTTACTGTTCTTA |
| 8004 | AAGAACAGTAAAACTGGGA | 10683 | TCCCAGTTTTACTGTTCTT |
| 8005 | AGAACAGTAAAACTGGGAG | 10684 | CTCCCAGTTTTACTGTTCT |
| 8006 | GAACAGTAAAACTGGGAGC | 10685 | GCTCCCAGTTTTACTGTTC |
| 8007 | AACAGTAAAACTGGGAGCC | 10686 | GGCTCCCAGTTTTACTGTT |
| 8008 | ACAGTAAAACTGGGAGCCT | 10687 | AGGCTCCCAGTTTTACTGT |
| 8009 | CAGTAAAACTGGGAGCCTT | 10688 | AAGGCTCCCAGTTTTACTG |
| 8010 | AGTAAAACTGGGAGCCTTC | 10689 | GAAGGCTCCCAGTTTTACT |
| 8011 | GTAAAACTGGGAGCCTTCC | 10690 | GGAAGGCTCCCAGTTTTAG |
| 8012 | TAAAACTGGGAGCCTTCCC | 10691 | GGGAAGGCTCCCAGTTTTA |
| 8013 | AAAACTGGGAGCGTTCCCG | 10692 | CGGGAAGGCTCCCAGTTTT |
| 8014 | AAACTGGGAGCCTTCCCGT | 10693 | ACGGGAAGGCTCCCAGTTT |
| 8015 | AACTGGGAGCCTTCGCGTC | 10694 | GACGGGAAGGCTCCCAGTT |
| 8016 | AGTGGGAGCCTTCCCGTCA | 10695 | TGACGGGAAGGCTCCCAGT |
| 8017 | CTGGGAGCCTTCCCGTCAG | 10696 | CTGACGGGAAGGCTCCCAG |
| 8018 | TGGGAGGCTTCCCGTCAGC | 10697 | GCTGACGGGAAGGCTCCCA |
| 8019 | GGGAGCCTTCCCGTCAGCG | 10698 | CGCTGACGGGAAGGCTCCC |
| 8020 | GGAGCCTTCCCGTCAGCGA | 10699 | TCGCTGACGGGAAGGCTCC |
| 8021 | GAGCCTTCCCGTCAGCGAG | 10700 | CTCGCTGACGGGAAGGCTC |
| 8022 | AGCCTTCCCGTCAGCGAGA | 10701 | TCTCGCTGACGGGAAGGCT |
| 8023 | GCCTTCCCGTCAGCGAGAT | 10702 | ATCTCGCTGACGGGAAGGC |
| 8024 | CCTTCCCGTCAGCGAGATC | 10703 | GATCTCGCTGACGGGAAGG |
| 8025 | CTTCCCGTCAGCGAGATCT | 10704 | AGATCTCGCTGACGGGAAG |
| 8026 | TTCCCGTCAGCGAGATCTA | 10705 | TAGATCTCGCTGACGGGAA |
| 8027 | TCCCGTCAGCGAGATCTAC | 10706 | GTAGATCTCGCTGACGGGA |
| 8028 | CCCGTCAGCGAGATCTACA | 10707 | TGTAGATCTCGCTGACGGG |
| 8029 | CCGTCAGCGAGATCTACAA | 10708 | TTGTAGATCTCGCTGACGG |
| 8030 | CGTCAGCGAGATCTACAAT | 10709 | ATTGTAGATCTCGCTGACG |
| 8031 | GTCAGCGAGATCTACAATT | 10710 | AATTGTAGATCTCGCTGAC |
| 8032 | TCAGCGAGATCTACAATTT | 10711 | AAATTGTAGATCTCGCTGA |
| 8033 | CAGCGAGATCTACAATTTT | 10712 | AAAATTGTAGATCTCGCTG |
| 8034 | AGCGAGATCTACAATTTTA | 10713 | TAAAATTGTAGATCTCGCT |
| 8035 | GCGAGATCTACAATTTTAT | 10714 | ATAAAATTGTAGATCTCGC |
| 8036 | CGAGATCTACAATTTTATG | 10715 | CATAAAATTGTAGATCTCG |
| 8037 | GAGATCTACAATTTTATGA | 10716 | TCATAAAATTGTAGATCTC |
| 8038 | AGATCTACAATTTTATGAC | 10717 | GTCATAAAATTGTAGATCT |
| 8039 | GATCTAGAATTTTATGACG | 10718 | CGTCATAAAATTGTAGATC |
| 8040 | ATCTACAATTTTATGACGG | 10719 | CCGTCATAAAATTGTAGAT |
| 8041 | TCTACAATTTTATGACGGA | 10720 | TCCGTCATAAAATTGTAGA |
| 8042 | CTACAATTTTATGACGGAG | 10721 | CTCCGTCATAAAATTGTAG |
| 8043 | TACAATTTTATGAGGGAGC | 10722 | GCTCCGTCATAAAATTGTA |
| 8044 | ACAATTTTATGACGGAGCA | 10723 | TGCTCCGTCATAAAATTGT |
| 8045 | CAATTTTATGACGGAGCAC | 10724 | GTGCTCCGTCATAAAATTG |
| 8046 | AATTTTATGACGGAGCACT | 10725 | AGTGCTCCGTCATAAAATT |
| 8047 | ATTTTATGACGGAGCACTT | 10726 | AAGTGCTCCGTCATAAAAT |
| 8048 | TTTTATGACGGAGCACTTT | 10727 | AAAGTGCTCCGTCATAAAA |
| 8049 | TTTATGACGGAGCACTTTC | 10728 | GAAAGTGCTCCGTCATAAA |
| 8050 | TTATGACGGAGCACTTTCC | 10729 | GGAAAGTGCTCCGTCATAA |
| 8051 | TATGACGGAGCACTTTCCT | 10730 | AGGAAAGTGCTGCGTCATA |
| 8052 | ATGACGGAGCACTTTCCTT | 10731 | AAGGAAAGTGCTCCGTCAT |
| 8053 | TGAGGGAGCAGTTTCCTTA | 10732 | TAAGGAAAGTGCTCCGTCA |
| 8054 | GACGGAGCACTTTCCTTAC | 10733 | GTAAGGAAAGTGCTCCGTC |
| 8055 | ACGGAGCACTTTCCTTACT | 10734 | AGTAAGGAAAGTGCTCCGT |
| 8056 | CGGAGCACTTTCCTTACTT | 10735 | AAGTAAGGAAAGTGCTCCG |
| 8057 | GGAGCACTTTCCTTACTTC | 10736 | GAAGTAAGGAAAGTGCTCC |
| 8058 | GAGCACTTTCCTTACTTGA | 10737 | TGAAGTAAGGAAAGTGCTC |
| 8059 | AGCACTTTCCTTACTTCAA | 10738 | TTGAAGTAAGGAAAGTGCT |
| 8060 | GCACTTTGCTTACTTCAAG | 10739 | CTTGAAGTAAGGAAAGTGC |
| 8061 | CACTTTCCTTACTTGAAGA | 10740 | TCTTGAAGTAAGGAAAGTG |
| 8062 | ACTTTCCTTACTTCAAGAC | 10741 | GTCTTGAAGTAAGGAAAGT |
| 8063 | CTTTCCTTACTTCAAGACA | 10742 | TGTCTTGAAGTAAGGAAAG |
| 8064 | TTTCCTTACTTCAAGACAG | 10743 | CTGTCTTGAAGTAAGGAAA |
| 8065 | TTCCTTACTTCAAGACAGC | 10744 | GCTGTCTTGAAGTAAGGAA |
| 8066 | TCCTTACTTCAAGACAGCA | 10745 | TGCTGTCTTGAAGTAAGGA |
| 8067 | CCTTACTTCAAGACAGCAC | 10746 | GTGCTGTCTTGAAGTAAGG |
| 8068 | CTTACTTCAAGACAGCACC | 10747 | GGTGCTGTCTTGAAGTAAG |
| 8069 | TTACTTCAAGACAGCACCC | 10748 | GGGTGCTGTCTTGAAGTAA |
| 8070 | TACTTCAAGACAGCACCCG | 10749 | CGGGTGCTGTCTTGAAGTA |
| 8071 | ACTTCAAGACAGCACCCGA | 10750 | TCGGGTGCTGTCTTGAAGT |
| 8072 | CTTCAAGACAGCACCCGAT | 10751 | ATCGGGTGCTGTCTTGAAG |
| 8073 | TTCAAGACAGCACCCGATG | 10752 | CATCGGGTGCTGTCTTGAA |
| 8074 | TCAAGACAGCACCCGATGG | 10753 | CCATCGGGTGCTGTCTTGA |
| 8075 | CAAGACAGCACCCGATGGC | 10754 | GCCATCGGGTGCTGTCTTG |
| 8076 | AAGACAGCACCCGATGGCT | 10755 | AGCCATCGGGTGCTGTCTT |
| 8077 | AGACAGCACCCGATGGCTG | 10756 | CAGCCATCGGGTGCTGTCT |
| 8078 | GACAGCACCCGATGGCTGG | 10757 | CCAGCCATCGGGTGCTGTC |
| 8079 | ACAGCACCCGATGGCTGGA | 10758 | TCCAGCCATCGGGTGCTGT |
| 8080 | CAGCACCCGATGGCTGGAA | 10759 | TTCCAGCCATCGGGTGCTG |
| 8081 | AGCACCCGATGGCTGGAAG | 10760 | CTTCCAGCCATCGGGTGCT |
| 8082 | GCACCCGATGGCTGGAAGA | 10761 | TCTTCCAGCCATCGGGTGC |
| 8083 | CACCCGATGGCTGGAAGAA | 10762 | TTCTTCCAGCCATCGGGTG |
| 8084 | ACCCGATGGCTGGAAGAAT | 10763 | ATTCTTCCAGCCATCGGGT |
| 8085 | CCCGATGGCTGGAAGAATT | 10764 | AATTCTTCCAGCCATCGGG |
| 8086 | CCGATGGCTGGAAGAATTC | 10765 | GAATTCTTCCAGCCATCGG |
| 8087 | CGATGGCTGGAAGAATTCT | 10766 | AGAATTCTTCCAGCCATCG |
| 8088 | GATGGCTGGAAGAATTCTG | 10767 | CAGAATTCTTCCAGCCATC |
| 8089 | ATGGCTGGAAGAATTCTGT | 10768 | ACAGAATTCTTCCAGCCAT |
| 8090 | TGGCTGGAAGAATTCTGTG | 10769 | GACAGAATTCTTCCAGCCA |
| 8091 | GGCTGGAAGAATTCTGTCC | 10770 | GGACAGAATTCTTCCAGCC |
| 8092 | GCTGGAAGAATTCTGTCCG | 10771 | CGGACAGAATTCTTCCAGC |
| 8093 | CTGGAAGAATTCTGTCCGG | 10772 | CCGGACAGAATTCTTCCAG |
| 8094 | TGGAAGAATTCTGTCCGGC | 10773 | GCCGGACAGAATTCTTCCA |
| 8095 | GGAAGAATTCTGTCCGGCA | 10774 | TGCCGGACAGAATTCTTCC |
| 8096 | GAAGAATTCTGTCCGGCAC | 10775 | GTGCCGGACAGAATTCTTC |
| 8097 | AAGAATTCTGTCCGGCACA | 10776 | TGTGCCGGACAGAATTCTT |
| 8098 | AGAATTCTGTCCGGCACAA | 10777 | TTGTGCCGGACAGAATTCT |
| 8099 | GAATTCTGTCCGGCACAAC | 10778 | GTTGTGCCGGACAGAATTC |
| 8100 | AATTCTGTCCGGCACAACC | 10779 | GGTTGTGCCGGACAGAATT |
| 8101 | ATTCTGTCCGGCACAACCT | 10780 | AGGTTGTGCCGGACAGAAT |
| 8102 | TTCTGTCCGGCACAACCTA | 10781 | TAGGTTGTGCCGGACAGAA |
| 8103 | TCTGTCCGGGACAACCTAT | 10782 | ATAGGTTGTGCCGGACAGA |
| 8104 | CTGTCCGGCACAACCTATC | 10783 | GATAGGTTGTGCCGGACAG |
| 8105 | TGTCCGGCACAACCTATCC | 10784 | GGATAGGTTGTGCCGGACA |
| 8106 | GTCCGGCACAAGCTATCCC | 10785 | GGGATAGGTTGTGCCGGAC |
| 8107 | TCCGGCACAACCTATCCCT | 10786 | AGGGATAGGTTGTGCCGGA |
| 8108 | CCGGCACAACCTATCCCTC | 10787 | GAGGGATAGGTTGTGCCGG |
| 8109 | CGGCACAACCTATCCCTCA | 10788 | TGAGGGATAGGTTGTGCCG |
| 8110 | GGCACAACCTATCCCTCAA | 10789 | TTGAGGGATAGGTTGTGCC |
| 8111 | GCACAACCTATCCCTCAAC | 10790 | GTTGAGGGATAGGTTGTGC |
| 8112 | CACAACCTATCCCTCAACA | 10791 | TGTTGAGGGATAGGTTGTG |
| 8113 | ACAACCTATCCCTCAACAA | 10792 | TTGTTGAGGGATAGGTTGT |
| 8114 | CAACCTATCCCTCAACAAG | 10793 | CTTGTTGAGGGATAGGTTG |
| 8115 | AACCTATCCCTCAACAAGT | 10794 | ACTTGTTGAGGGATAGGTT |
| 8116 | ACCTATCCCTCAACAAGTG | 10795 | CACTTGTTGAGGGATAGGT |
| 8117 | CCTATCCCTCAACAAGTGC | 10796 | GCACTTGTTGAGGGATAGG |
| 8118 | CTATCCCTCAACAAGTGCT | 10797 | AGCACTTGTTGAGGGATAG |
| 8119 | TATCGCTCAACAAGTGCTT | 10798 | AAGCACTTGTTGAGGGATA |
| 8120 | ATCCCTCAACAAGTGCTTC | 10799 | GAAGCACTTGTTGAGGGAT |
| 8121 | TCCCTCAACAAGTGCTTCG | 10800 | CGAAGCACTTGTTGAGGGA |
| 8122 | CCCTCAACAAGTGCTTCGA | 10801 | TCGAAGCACTTGTTGAGGG |
| 8123 | CCTCAACAAGTGCTTCGAG | 10802 | CTCGAAGCACTTGTTGAGG |
| 8124 | CTCAACAAGTGCTTCGAGA | 10803 | TCTCGAAGCACTTGTTGAG |
| 8125 | TCAACAAGTGCTTCGAGAA | 10804 | TTCTCGAAGCACTTGTTGA |
| 8126 | CAACAAGTGCTTCGAGAAG | 10805 | CTTCTCGAAGCACTTGTTG |
| 8127 | AACAAGTGCTTCGAGAAGG | 10806 | CCTTCTCGAAGCACTTGTT |
| 8128 | ACAAGTGCTTCGAGAAGGT | 10807 | ACCTTCTCGAAGCACTTGT |
| 8129 | CAAGTGCTTCGAGAAGGTG | 10808 | CACCTTCTCGAAGCACTTG |
| 8130 | AAGTGCTTCGAGAAGGTGG | 10809 | CCACCTTCTCGAAGCACTT |
| 8131 | AGTGCTTCGAGAAGGTGGA | 10810 | TCCACCTTCTCGAAGCACT |
| 8132 | GTGCTTCGAGAAGGTGGAG | 10811 | CTCCACCTTCTCGAAGCAC |
| 8133 | TGCTTCGAGAAGGTGGAGA | 10812 | TCTCCACCTTCTCGAAGCA |
| 8134 | GCTTCGAGAAGGTGGAGAA | 10813 | TTCTCCAGCTTCTCGAAGC |
| 8135 | CTTCGAGAAGGTGGAGAAC | 10814 | GTTCTCCACCTTCTCGAAG |
| 8136 | TTCGAGAAGGTGGAGAACA | 10815 | TGTTCTCCACCTTCTCGAA |
| 8137 | TCGAGAAGGTGGAGAACAA | 10816 | TTGTTCTCCACCTTCTCGA |
| 8138 | CGAGAAGGTGGAGAACAAA | 10817 | TTTGTTCTGCACCTTCTCG |
| 8139 | GAGAAGGTGGAGAACAAAT | 10818 | ATTTGTTGTCCACCTTCTC |
| 8140 | AGAAGGTGGAGAACAAATC | 10819 | GATTTGTTCTCCACCTTCT |
| 8141 | GAAGGTGGAGAACAAATCA | 10820 | TGATTTGTTCTCCACCTTC |
| 8142 | AAGGTGGAGAACAAATCAG | 10821 | CTGATTTGTTCTCCACCTT |
| 8143 | AGGTGGAGAACAAATCAGG | 10822 | CCTGATTTGTTCTCCACCT |
| 8144 | GGTGGAGAACAAATCAGGA | 10823 | TCCTGATTTGTTCTCCACC |
| 8145 | GTGGAGAACAAATCAGGAA | 10824 | TTCCTGATTTGTTCTCCAC |
| 8146 | TGGAGAACAAATCAGGAAG | 10825 | CTTCCTGATTTGTTCTCCA |
| 8147 | GGAGAACAAATCAGGAAGT | 10826 | ACTTCCTGATTTGTTCTCC |
| 8148 | GAGAACAAATCAGGAAGTT | 10827 | AACTTCCTGATTTGTTCTC |
| 8149 | AGAACAAATCAGGAAGTTC | 10828 | GAACTTCCTGATTTGTTCT |
| 8150 | GAACAAATCAGGAAGTTCC | 10829 | GGAACTTCCTGATTTGTTC |
| 8151 | AACAAATCAGGAAGTTCCT | 10830 | AGGAACTTCCTGATTTGTT |
| 8152 | ACAAATCAGGAAGTTCCTC | 10831 | GAGGAACTTCCTGATTTGT |
| 8153 | CAAATCAGGAAGTTCCTCC | 10832 | GGAGGAACTTCCTGATTTG |
| 8154 | AAATCAGGAAGTTCCTCCC | 10833 | GGGAGGAACTTCCTGATTT |
| 8155 | AATCAGGAAGTTCCTCCCG | 10834 | CGGGAGGAACTTCCTGATT |
| 8156 | ATCAGGAAGTTCCTCCCGC | 10835 | GCGGGAGGAACTTCCTGAT |
| 8157 | TCAGGAAGTTCCTCCCGCA | 10836 | TGCGGGAGGAACTTCCTGA |
| 8158 | CAGGAAGTTCCTCCCGCAA | 10837 | TTGCGGGAGGAACTTCCTG |
| 8159 | AGGAAGTTCCTCCCGCAAG | 10838 | CTTGCGGGAGGAACTTCCT |
| 8160 | GGAAGTTCCTCCCGCAAGG | 10839 | CCTTGCGGGAGGAACTTCC |
| 8161 | GAAGTTCCTCCCGCAAGGG | 10840 | CCCTTGCGGGAGGAACTTC |
| 8162 | AAGTTCCTCCCGCAAGGGC | 10841 | GCCCTTGCGGGAGGAACTT |
| 8163 | AGTTCCTCCCGCAAGGGCT | 10842 | AGCCCTTGCGGGAGGAACT |
| 8164 | GTTCCTCCCGCAAGGGCTG | 10843 | CAGCCCTTGCGGGAGGAAC |
| 8165 | TTCCTCCCGCAAGGGCTGC | 10844 | GCAGCCCTTGCGGGAGGAA |
| 8166 | TCCTCCCGCAAGGGCTGCC | 10845 | GGCAGCCCTTGCGGGAGGA |
| 8167 | CCTCCCGCAAGGGCTGCCT | 10846 | AGGCAGCCCTTGCGGGAGG |
| 8168 | CTCCCGCAAGGGCTGCCTG | 10847 | GAGGCAGCCCTTGCGGGAG |
| 8169 | TCCCGCAAGGGCTGCCTGT | 10848 | ACAGGCAGCCCTTGCGGGA |
| 8170 | CCCGCAAGGGCTGCCTGTG | 10849 | CACAGGCAGCCCTTGCGGG |
| 8171 | CCGCAAGGGCTGCCTGTGG | 10850 | CCACAGGCAGCCCTTGCGG |
| 8172 | CGCAAGGGCTGCCTGTGGG | 10851 | CCCACAGGCAGCCCTTGCG |
| 8173 | GCAAGGGCTGCCTGTGGGC | 10852 | GCCCACAGGCAGCCCTTGC |
| 8174 | CAAGGGCTGCCTGTGGGCC | 10853 | GGCCCACAGGCAGCCCTTG |
| 8175 | AAGGGCTGCCTGTGGGCCC | 10854 | GGGCCCACAGGCAGCCCTT |
| 8176 | AGGGCTGCCTGTGGGCCCT | 10855 | AGGGCCCACAGGCAGCCCT |
| 8177 | GGGCTGCCTGTGGGCCCTC | 10856 | GAGGGCCCACAGGCAGCCC |
| 8178 | GGCTGCCTGTGGGCCCTCA | 10857 | TGAGGGCCCACAGGCAGCC |
| 8179 | GCTGCCTGTGGGCCCTCAA | 10858 | TTGAGGGCCCACAGGCAGC |
| 8180 | CTGCCTGTGGGCCCTCAAT | 10859 | ATTGAGGGCCCACAGGCAG |
| 8181 | TGCCTGTGGGCCCTCAATC | 10860 | GATTGAGGGCCCACAGGCA |
| 8182 | GCCTGTGGGCCCTCAATCC | 10861 | GGATTGAGGGCCCACAGGC |
| 8183 | CCTGTGGGCCCTCAATCCG | 10862 | CGGATTGAGGGCCGACAGG |
| 8184 | CTGTGGGCCCTCAATCCGG | 10863 | CGGGATTGAGGGCGCACAG |
| 8185 | TGTGGGCCCTCAATCCGGC | 10864 | GGCGGATTGAGGGCCCACA |
| 8186 | GTGGGCCCTGAATCCGGCC | 10865 | GGCCGGATTGAGGGCCCAC |
| 8187 | TGGGCCCTCAATCCGGCCA | 10866 | TGGCCGGATTGAGGGCCCA |
| 8188 | GGGCCCTCAATCCGGCCAA | 10867 | TTGGCCGGATTGAGGGCCC |
| 8189 | GGCCCTCAATCCGGCCAAG | 10868 | CTTGGCCGGATTGAGGGCC |
| 8190 | GCCCTCAATCCGGCCAAGA | 10869 | TCTTGGCCGGATTGAGGGC |
| 8191 | CCCTCAATCCGGCCAAGAT | 10870 | ATCTTGGCCGGATTGAGGG |
| 8192 | CCTCAATCCGGCCAAGATC | 10871 | GATCTTGGCCGGATTGAGG |
| 8193 | CTCAATCCGGCCAAGATCG | 10872 | CGATCTTGGCCGGATTGAG |
| 8194 | TCAATCCGGCCAAGATCGA | 10873 | TCGATCTTGGCCGGATTGA |
| 8195 | CAATCCGGCCAAGATCGAC | 10874 | GTGGATCTTGGCCGGATTG |
| 8196 | AATCCGGCCAAGATCGACA | 10875 | TGTCGATGTTGGCCGGATT |
| 8197 | ATCCGGCCAAGATCGACAA | 10876 | TTGTCGATCTTGGCCGGAT |
| 8198 | TCCGGCCAAGATCGACAAG | 10877 | CTTGTCGATCTTGGCCGGA |
| 8199 | CCGGCCAAGATCGAGAAGA | 10878 | TCTTGTCGATCTTGGCCGG |
| 8200 | CGGCCAAGATCGACAAGAT | 10879 | ATCTTGTCGATCTTGGCCG |
| 8201 | GGCCAAGATCGACAAGATG | 10880 | CATCTTGTCGATCTTGGCC |
| 8202 | GCCAAGATCGACAAGATGC | 10881 | GCATCTTGTCGATCTTGGC |
| 8203 | CCAAGATCGACAAGATGCA | 10882 | TGCATCTTGTCGATCTTGG |
| 8204 | CAAGATCGACAAGATGCAA | 10883 | TTGCATCTTGTCGATCTTG |
| 8205 | AAGATCGACAAGATGCAAG | 10884 | CTTGCATGTTGTCGATCTT |
| 8206 | AGATCGACAAGATGCAAGA | 10885 | TCTTGCATCTTGTCGATCT |
| 8207 | GATCGACAAGATGCAAGAG | 10886 | CTCTTGCATCTTGTCGATC |
| 8208 | ATCGACAAGATGCAAGAGG | 10887 | CCTCTTGCATCTTGTCGAT |
| 8209 | TCGACAAGATGCAAGAGGA | 10888 | TCCTCTTGCATCTTGTCGA |
| 8210 | CGACAAGATGCAAGAGGAG | 10889 | CTCCTGTTGCATCTTGTCG |
| 8211 | GACAAGATGCAAGAGGAGC | 10890 | GCTCCTCTTGCATCTTGTC |
| 8212 | ACAAGATGCAAGAGGAGCT | 10891 | AGCTCCTCTTGCATCTTGT |
| 8213 | CAAGATGCAAGAGGAGCTG | 10892 | CAGCTCCTCTTGCATCTTG |
| 8214 | AAGATGCAAGAGGAGCTGC | 10893 | GCAGCTCCTCTTGCATCTT |
| 8215 | AGATGCAAGAGGAGCTGCA | 10894 | TGCAGCTCCTCTTGCATCT |
| 8216 | GATGCAAGAGGAGCTGCAA | 10895 | TTGCAGCTCCTCTTGCATC |
| 8217 | ATGCAAGAGGAGCTGCAAA | 10896 | TTTGCAGCTCCTCTTGCAT |
| 8218 | TGCAAGAGGAGCTGCAAAA | 10897 | TTTTGCAGCTCCTCTTGCA |
| 8219 | GCAAGAGGAGCTGCAAAAA | 10898 | TTTTTGCAGCTCCTCTTGC |
| 8220 | CAAGAGGAGCTGCAAAAAT | 10899 | ATTTTTGCAGCTCCTCTTG |
| 8221 | AAGAGGAGCTGCAAAAATG | 10900 | CATTTTTGCAGCTCCTCTT |
| 8222 | AGAGGAGCTGCAAAAATGG | 10901 | CCATTTTTGCAGCTCCTCT |
| 8223 | GAGGAGCTGCAAAAATGGA | 10902 | TCCATTTTTGCAGCTCCTC |
| 8224 | AGGAGCTGCAAAAATGGAA | 10903 | TTCCATTTTTGCAGCTCCT |
| 8225 | GGAGCTGCAAAAATGGAAG | 10904 | CTTCCATTTTTGCAGCTCC |
| 8226 | GAGCTGCAAAAATGGAAGA | 10905 | TCTTCCATTTTTGCAGCTC |
| 8227 | AGCTGCAAAAATGGAAGAG | 10906 | CTCTTCCATTTTTGCAGCT |
| 8228 | GCTGCAAAAATGGAAGAGG | 10907 | CCTCTTCCATTTTTGCAGC |
| 8229 | CTGCAAAAATGGAAGAGGA | 10908 | TCCTCTTCCATTTTTGCAG |
| 8230 | TGCAAAAATGGAAGAGGAA | 10909 | TTCCTCTTCCATTTTTGCA |
| 8231 | GCAAAAATGGAAGAGGAAA | 10910 | TTTCCTCTTCCATTTTTGC |
| 8232 | CAAAAATGGAAGAGGAAAG | 10911 | CTTTCCTCTTCCATTTTTG |
| 8233 | AAAAATGGAAGAGGAAAGA | 10912 | TCTTTCCTCTTCCATTTTT |
| 8234 | AAAATGGAAGAGGAAAGAT | 10913 | ATCTTTCCTCTTCCATTTT |
| 8235 | AAATGGAAGAGGAAAGATC | 10914 | GATCTTTCCTCTTCCATTT |
| 8236 | AATGGAAGAGGAAAGATCC | 10915 | GGATCTTTCCTCTTCCATT |
| 8237 | ATGGAAGAGGAAAGATCCC | 10916 | GGGATCTTTCCTCTTCCAT |
| 8238 | TGGAAGAGGAAAGATCCCA | 10917 | TGGGATCTTTCCTCTTCCA |
| 8239 | GGAAGAGGAAAGATCCCAT | 10918 | ATGGGATCTTTCCTCTTCG |
| 8240 | GAAGAGGAAAGATCCCATT | 10919 | AATGGGATCTTTCCTCTTC |
| 8241 | AAGAGGAAAGATCCCATTG | 10920 | CAATGGGATCTTTCCTCTT |
| 8242 | AGAGGAAAGATCCCATTGC | 10921 | GCAATGGGATCTTTCCTCT |
| 8243 | GAGGAAAGATCCCATTGCT | 10922 | AGCAATGGGATCTTTCCTC |
| 8244 | AGGAAAGATCCCATTGCTG | 10923 | CAGCAATGGGATCTTTCCT |
| 8245 | GGAAAGATCCCATTGCTGT | 10924 | ACAGCAATGGGATCTTTCC |
| 8246 | GAAAGATCCCATTGCTGTG | 10925 | CACAGCAATGGGATCTTTC |
| 8247 | AAAGATCCCATTGCTGTGC | 10926 | GCACAGCAATGGGATCTTT |
| 8248 | AAGATCCCATTGCTGTGCG | 10927 | CGCACAGCAATGGGATCTT |
| 8249 | AGATCCCATTGCTGTGCGC | 10928 | GCGCACAGCAATGGGATCT |
| 8250 | GATCCCATTGCTGTGCGCA | 10929 | TGCGCACAGCAATGGGATC |
| 8251 | ATCCCATTGCTGTGCGCAA | 10930 | TTGCGCACAGCAATGGGAT |
| 8252 | TCCCATTGCTGTGCGCAAA | 10931 | TTTGCGCACAGCAATGGGA |
| 8253 | CCCATTGCTGTGCGCAAAA | 10932 | TTTTGCGCACAGCAATGGG |
| 8254 | CCATTGCTGTGCGCAAAAG | 10933 | CTTTTGCGCACAGCAATGG |
| 8255 | CATTGCTGTGCGCAAAAGC | 10934 | GCTTTTGCGCACAGCAATG |
| 8256 | ATTGCTGTGCGCAAAAGCA | 10935 | TGCTTTTGCGCACAGCAAT |
| 8257 | TTGCTGTGCGCAAAAGCAT | 10936 | ATGCTTTTGCGCACAGCAA |
| 8258 | TGCTGTGCGCAAAAGCATG | 10937 | CATGCTTTTGCGCACAGCA |
| 8259 | GCTGTGCGCAAAAGCATGG | 10938 | CCATGCTTTTGCGCACAGC |
| 8260 | CTGTGCGCAAAAGCATGGC | 10939 | GCCATGCTTTTGCGCACAG |
| 8261 | TGTGCGCAAAAGCATGGCC | 10940 | GGCCATGCTTTTGCGCACA |
| 8262 | GTGCGCAAAAGCATGGCCA | 10941 | TGGCCATGCTTTTGCGCAC |
| 8263 | TGCGCAAAAGCATGGCCAA | 10942 | TTGGCCATGCTTTTGCGCA |
| 8264 | GCGCAAAAGCATGGCCAAG | 10943 | CTTGGCCATGCTTTTGCGC |
| 8265 | CGCAAAAGCATGGCCAAGC | 10944 | GCTTGGCCATGCTTTTGCG |
| 8266 | GCAAAAGCATGGCCAAGCC | 10945 | GGCTTGGCCATGCTTTTGC |
| 8267 | CAAAAGCATGGCCAAGCCA | 10946 | TGGCTTGGCCATGCTTTTG |
| 8268 | AAAAGCATGGCCAAGCCAG | 10947 | CTGGGTTGGCCATGCTTTT |
| 8269 | AAAGCATGGCCAAGCCAGA | 10948 | TCTGGCTTGGCCATGCTTT |
| 8270 | AAGCATGGCCAAGCCAGAA | 10949 | TTCTGGCTTGGCCATGCTT |
| 8271 | AGCATGGCCAAGCCAGAAG | 10950 | CTTCTGGCTTGGCCATGCT |
| 8272 | GCATGGCCAAGCCAGAAGA | 10951 | TCTTCTGGCTTGGCCATGC |
| 8273 | CATGGCCAAGCCAGAAGAG | 10952 | CTGTTCTGGCTTGGCCATG |
| 8274 | ATGGCCAAGCCAGAAGAGC | 10953 | GCTCTTCTGGCTTGGCCAT |
| 8275 | TGGCCAAGCCAGAAGAGCT | 10954 | AGCTCTTCTGGCTTGGCCA |
| 8276 | GGCCAAGCCAGAAGAGCTG | 10955 | CAGCTCTTCTGGCTTGGCC |
| 8277 | GCCAAGCCAGAAGAGCTGG | 10956 | CCAGCTCTTCTGGCTTGGC |
| 8278 | CCAAGCCAGAAGAGCTGGA | 10957 | TCCAGCTCTTCTGGCTTGG |
| 8279 | CAAGCCAGAAGAGCTGGAC | 10958 | GTCCAGCTCTTCTGGCTTG |
| 8280 | AAGCCAGAAGAGCTGGAGA | 10959 | TGTCCAGCTCTTCTGGCTT |
| 8281 | AGCCAGAAGAGCTGGACAG | 10960 | CTGTCCAGCTCTTCTGGCT |
| 8282 | GCCAGAAGAGCTGGACAGC | 10961 | GCTGTCCAGCTCTTCTGGC |
| 8283 | CCAGAAGAGCTGGACAGCC | 10962 | GGCTGTCCAGCTCTTCTGG |
| 8284 | CAGAAGAGCTGGACAGCCT | 10963 | AGGCTGTCCAGCTCTTCTG |
| 8285 | AGAAGAGCTGGACAGCCTC | 10964 | GAGGCTGTCCAGCTCTTCT |
| 8286 | GAAGAGCTGGACAGCCTCA | 10965 | TGAGGCTGTCCAGCTCTTC |
| 8287 | AAGAGCTGGACAGCCTCAT | 10966 | ATGAGGCTGTCCAGCTCTT |
| 8288 | AGAGCTGGACAGCCTCATT | 10967 | AATGAGGCTGTCCAGCTCT |
| 8289 | GAGCTGGACAGCCTCATTG | 10968 | CAATGAGGCTGTCCAGCTC |
| 8290 | AGCTGGACAGCCTCATTGG | 10969 | CCAATGAGGCTGTCCAGCT |
| 8291 | GCTGGACAGCCTCATTGGA | 10970 | TCCAATGAGGCTGTCCAGC |
| 8292 | CTGGACAGCCTCATTGGAG | 10971 | CTCCAATGAGGCTGTCCAG |
| 8293 | TGGACAGCCTCATTGGAGA | 10972 | TCTCCAATGAGGCTGTCCA |
| 8294 | GGACAGCCTCATTGGAGAC | 10973 | GTCTCCAATGAGGCTGTCC |
| 8295 | GACAGCCTCATTGGAGACA | 10974 | TGTCTCCAATGAGGCTGTC |
| 8296 | ACAGCCTCATTGGAGACAA | 10975 | TTGTCTCCAATGAGGCTGT |
| 8297 | CAGCCTCATTGGAGACAAG | 10976 | CTTGTCTCCAATGAGGCTG |
| 8298 | AGCCTCATTGGAGACAAGA | 10977 | TCTTGTCTCCAATGAGGCT |
| 8299 | GCCTCATTGGAGACAAGAG | 10978 | CTCTTGTCTCCAATGAGGC |
| 8300 | CCTCATTGGAGACAAGAGA | 10979 | TCTCTTGTCTCCAATGAGG |
| 8301 | CTCATTGGAGACAAGAGAG | 10980 | CTCTCTTGTCTCCAATGAG |
| 8302 | TCATTGGAGACAAGAGAGA | 10981 | TCTCTCTTGTCTCCAATGA |
| 8303 | CATTGGAGACAAGAGAGAA | 10982 | TTCTCTCTTGTCTCCAATG |
| 8304 | ATTGGAGACAAGAGAGAAA | 10983 | TTTCTCTCTTGTCTCCAAT |
| 8305 | TTGGAGACAAGAGAGAAAA | 10984 | TTTTCTCTCTTGTCTCCAA |
| 8306 | TGGAGACAAGAGAGAAAAG | 10985 | CTTTTCTCTCTTGTCTCCA |
| 8307 | GGAGACAAGAGAGAAAAGC | 10986 | GCTTTTCTCTCTTGTCTCC |
| 8308 | GAGACAAGAGAGAAAAGCT | 10987 | AGCTTTTCTCTCTTGTCTC |
| 8309 | AGACAAGAGAGAAAAGCTG | 10988 | CAGCTTTTCTCTCTTGTCT |
| 8310 | GACAAGAGAGAAAAGCTGG | 10989 | CCAGCTTTTCTCTCTTGTC |
| 8311 | ACAAGAGAGAAAAGCTGGG | 10990 | CCCAGCTTTTCTCTCTTGT |
| 8312 | CAAGAGAGAAAAGCTGGGC | 10991 | GCCCAGCTTTTCTCTCTTG |
| 8313 | AAGAGAGAAAAGCTGGGCT | 10992 | AGCCCAGCTTTTCTCTCTT |
| 8314 | AGAGAGAAAAGCTGGGCTC | 10993 | GAGCCCAGCTTTTCTCTCT |
| 8315 | GAGAGAAAAGCTGGGCTCC | 10994 | GGAGCCCAGCTTTTCTCTC |
| 8316 | AGAGAAAAGCTGGGCTCCC | 10995 | GGGAGCCCAGCTTTTCTCT |
| 8317 | GAGAAAAGCTGGGCTCCCC | 10996 | GGGGAGCCCAGCTTTTCTC |
| 8318 | AGAAAAGCTGGGCTCCCCA | 10997 | TGGGGAGGCCAGCTTTTCT |
| 8319 | GAAAAGCTGGGCTCCCCAC | 10998 | GTGGGGAGCCCAGCTTTTC |
| 8320 | AAAAGCTGGGCTCCCCACT | 10999 | AGTGGGGAGCCCAGCTTTT |
| 8321 | AAAGCTGGGCTCCCCAGTC | 11000 | GAGTGGGGAGCCCAGCTTT |
| 8322 | AAGCTGGGCTCCCCACTCC | 11001 | GGAGTGGGGAGCCCAGCTT |
| 8323 | AGCTGGGCTCCCCACTCCT | 11002 | AGGAGTGGGGAGCCCAGCT |
| 8324 | GCTGGGCTCCCCACTCCTG | 11003 | CAGGAGTGGGGAGCCCAGC |
| 8325 | CTGGGCTCCCCACTCCTGG | 11004 | CCAGGAGTGGGGAGCCCAG |
| 8326 | TGGGCTCCCCACTCCTGGG | 11005 | CCCAGGAGTGGGGAGCCCA |
| 8327 | GGGCTCCCCACTCCTGGGC | 11006 | GCCGAGGAGTGGGGAGCCC |
| 8328 | GGCTCCCCACTCCTGGGCT | 11007 | AGCCCAGGAGTGGGGAGCC |
| 8329 | GCTCCCCACTCCTGGGCTG | 11008 | CAGCCCAGGAGTGGGGAGC |
| 8330 | CTCCCCACTCCTGGGCTGT | 11009 | ACAGCCCAGGAGTGGGGAG |
| 8331 | TCCCCACTCCTGGGCTGTC | 11010 | GACAGCCCAGGAGTGGGGA |
| 8332 | CCCCACTCCTGGGCTGTCC | 11011 | GGACAGCCCAGGAGTGGGG |
| 8333 | CCCACTCCTGGGCTGTCCG | 11012 | CGGACAGCCCAGGAGTGGG |
| 8334 | CCACTCCTGGGCTGTCCGC | 11013 | GCGGACAGCCCAGGAGTGG |
| 8335 | CACTCCTGGGCTGTCCGCC | 11014 | GGCGGACAGCCCAGGAGTG |
| 8336 | ACTCCTGGGCTGTCCGCCC | 11015 | GGGCGGACAGCCCAGGAGT |
| 8337 | CTCCTGGGCTGTCCGCCCC | 11016 | GGGGCGGACAGCCCAGGAG |
| 8338 | TCCTGGGCTGTCGGCCCCC | 11017 | GGGGGCGGACAGCCCAGGA |
| 8339 | CCTGGGCTGTCCGCCCCCT | 11018 | AGGGGGCGGACAGCCCAGG |
| 8340 | CTGGGCTGTCCGCCCCCTG | 11019 | CAGGGGGCGGACAGCCCAG |
| 8341 | TGGGCTGTCCGCCCCCTGG | 11020 | CCAGGGGGCGGACAGCCCA |
| 8342 | GGGCTGTCCGCCCCCTGGG | 11021 | CCCAGGGGGCGGACAGCCC |
| 8343 | GGCTGTCCGCCCCCTGGGC | 11022 | GCCCAGGGGGCGGACAGCC |
| 8344 | GCTGTCCGCCCCCTGGGCT | 11023 | AGCCCAGGGGGCGGACAGC |
| 8345 | CTGTCCGCCCCCTGGGCTG | 11024 | GAGCCCAGGGGGCGGACAG |
| 8346 | TGTCCGCCCCCTGGGCTGT | 11025 | ACAGCCCAGGGGGCGGACA |
| 8347 | GTCCGCCCCCTGGGCTGTC | 11026 | GACAGCCCAGGGGGCGGAC |
| 8348 | TCCGCCCCCTGGGCTGTCC | 11027 | GGACAGCCCAGGGGGCGGA |
| 8349 | CCGCCCCCTGGGCTGTCCG | 11028 | CGGACAGCCCAGGGGGCGG |
| 8350 | CGCCCCCTGGGCTGTCCGG | 11029 | CCGGACAGCCCAGGGGGCG |
| 8351 | GCCCCCTGGGCTGTCCGGC | 11030 | GCCGGACAGCCCAGGGGGC |
| 8352 | CCCCCTGGGCTGTCCGGCT | 11031 | AGCCGGACAGCCCAGGGGG |
| 8353 | CCCCTGGGCTGTCCGGCTC | 11032 | GAGCCGGACAGCCCAGGGG |
| 8354 | CCCTGGGCTGTCCGGCTCA | 11033 | TGAGCCGGACAGCCCAGGG |
| 8355 | CCTGGGCTGTCCGGCTCAG | 11034 | CTGAGCCGGACAGCCCAGG |
| 8356 | CTGGGCTGTCCGGCTCAGG | 11035 | CCTGAGCCGGACAGCCCAG |
| 8357 | TGGGCTGTCCGGCTCAGGC | 11036 | GCCTGAGCCGGACAGCCCA |
| 8358 | GGGCTGTCCGGCTCAGGCC | 11037 | GGCCTGAGCCGGACAGCCC |
| 8359 | GGCTGTGCGGCTCAGGCCC | 11038 | GGGCCTGAGCCGGACAGCC |
| 8360 | GCTGTCCGGCTCAGGCCCC | 11039 | GGGGCCTGAGCCGGACAGC |
| 8361 | CTGTCCGGCTCAGGCCCCA | 11040 | TGGGGCCTGAGCCGGACAG |
| 8362 | TGTCCGGCTCAGGCCCCAT | 11041 | ATGGGGCCTGAGCCGGACA |
| 8363 | GTCCGGCTCAGGCCCCATC | 11042 | GATGGGGCCTGAGCCGGAC |
| 8364 | TCCGGCTCAGGCCCCATCC | 11043 | GGATGGGGCCTGAGCCGGA |
| 8365 | CCGGCTCAGGCCCCATCCG | 11044 | CGGATGGGGCCTGAGCCGG |
| 8366 | CGGCTCAGGCCCCATCCGG | 11045 | CCGGATGGGGCCTGAGCCG |
| 8367 | GGCTCAGGCCCCATCCGGC | 11046 | GCCGGATGGGGCCTGAGCC |
| 8368 | GCTCAGGCCCCATCCGGCC | 11047 | GGCCGGATGGGGCCTGAGC |
| 8369 | CTCAGGCCCCATCCGGCCC | 11048 | GGGCCGGATGGGGCCTGAG |
| 8370 | TCAGGCCCCATCCGGCCCC | 11049 | GGGGCCGGATGGGGCCTGA |
| 8371 | CAGGCCGCATCCGGCCCCT | 11050 | AGGGGCCGGATGGGGCCTG |
| 8372 | AGGCCCCATCCGGCCCCTG | 11051 | CAGGGGCCGGATGGGGCCT |
| 8373 | GGCCCCATCCGGCCCCTGG | 11052 | CCAGGGGCCGGATGGGGCC |
| 8374 | GCCCCATCCGGCCCCTGGC | 11053 | GCCAGGGGCCGGATGGGGC |
| 8375 | CCCCATCCGGCCGCTGGCA | 11054 | TGCCAGGGGCCGGATGGGG |
| 8376 | CCCATCCGGCCCCTGGCAC | 11055 | GTGCCAGGGGCCGGATGGG |
| 8377 | CCATCCGGCCCCTGGCACC | 11056 | GGTGCCAGGGGCCGGATGG |
| 8378 | CATCCGGCCCCTGGCACCC | 11057 | GGGTGCCAGGGGCCGGATG |
| 8379 | ATCCGGCCCCTGGCACCCC | 11058 | GGGGTGCCAGGGGCCGGAT |
| 8380 | TCCGGCCCCTGGCACCCCC | 11059 | GGGGGTGCCAGGGGCCGGA |
| 8381 | CCGGCCCCTGGCACCCCCA | 11060 | TGGGGGTGCCAGGGGCCGG |
| 8382 | CGGCCCCTGGCACCCCCAG | 11061 | CTGGGGGTGCCAGGGGCCG |
| 8383 | GGCCCCTGGCACCCCCAGC | 11062 | GCTGGGGGTGCCAGGGGCC |
| 8384 | GCCCCTGGCACCCCCAGCT | 11063 | AGCTGGGGGTGCCAGGGGC |
| 8385 | CCCCTGGCACCCCCAGCTG | 11064 | CAGGTGGGGGTGCCAGGGG |
| 8386 | CCCTGGCACCCCCAGCTGG | 11065 | CCAGCTGGGGGTGCCAGGG |
| 8387 | CCTGGCACCCCCAGCTGGC | 11066 | GCCAGCTGGGGGTGCCAGG |
| 8388 | CTGGCACCCCCAGCTGGCC | 11067 | GGCCAGCTGGGGGTGCCAG |
| 8389 | TGGCACCCCCAGCTGGCCT | 11068 | AGGCCAGCTGGGGGTGCCA |
| 8390 | GGCACCCCCAGCTGGCCTC | 11069 | GAGGCCAGCTGGGGGTGCC |
| 8391 | GCACCCCCAGCTGGCCTCT | 11070 | AGAGGCCAGCTGGGGGTGC |
| 8392 | CACCCCCAGCTGGCCTCTC | 11071 | GAGAGGCCAGCTGGGGGTG |
| 8393 | ACCCCCAGCTGGCCTCTCC | 11072 | GGAGAGGCCAGCTGGGGGT |
| 8394 | CCCCCAGCTGGCCTCTGCC | 11073 | GGGAGAGGCCAGCTGGGGG |
| 8395 | CCCCAGCTGGCCTCTCCCC | 11074 | GGGGAGAGGCCAGCTGGGG |
| 8396 | CCCAGCTGGCCTCTCCCCA | 11075 | TGGGGAGAGGCCAGCTGGG |
| 8397 | CCAGCTGGCCTCTCCCCAC | 11076 | GTGGGGAGAGGCCAGCTGG |
| 8398 | CAGCTGGCCTCTCCCCACC | 11077 | GGTGGGGAGAGGCCAGCTG |
| 8399 | AGCTGGCCTCTCCCCACCA | 11078 | TGGTGGGGAGAGGCCAGCT |
| 8400 | GCTGGCCTCTCCCCACCAC | 11079 | GTGGTGGGGAGAGGCCAGC |
| 8401 | CTGGCCTCTCCCCACCACT | 11080 | AGTGGTGGGGAGAGGCCAG |
| 8402 | TGGCCTCTCCCCACCACTG | 11081 | CAGTGGTGGGGAGAGGCCA |
| 8403 | GGCCTCTCCCCACCACTGC | 11082 | GCAGTGGTGGGGAGAGGCC |
| 8404 | GCCTCTCCCCACCACTGCA | 11083 | TGCAGTGGTGGGGAGAGGC |
| 8405 | CCTCTCCCCACCACTGCAC | 11084 | GTGCAGTGGTGGGGAGAGG |
| 8406 | CTCTCCCCACCACTGCACT | 11085 | AGTGCAGTGGTGGGGAGAG |
| 8467 | TCTCCCCACCACTGCACTC | 11086 | GAGTGCAGTGGTGGGGAGA |
| 8408 | CTCCCCACCACTGCACTCA | 11087 | TGAGTGCAGTGGTGGGGAG |
| 8409 | TCGCCACCACTGCACTCAC | 11088 | GTGAGTGCAGTGGTGGGGA |
| 8410 | CCCCACCACTGCACTCACT | 11089 | AGTGAGTGCAGTGGTGGGG |
| 8411 | CCCACCACTGCACTCACTC | 11090 | GAGTGAGTGCAGTGGTGGG |
| 8412 | CCACCACTGCACTCACTCC | 11091 | GGAGTGAGTGCAGTGGTGG |
| 8413 | CACCACTGCACTCACTCCA | 11092 | TGGAGTGAGTGCAGTGGTG |
| 8414 | ACCACTGCACTCACTCCAC | 11093 | GTGGAGTGAGTGCAGTGGT |
| 8415 | GCACTGCACTCACTCCACC | 11094 | GGTGGAGTGAGTGCAGTGG |
| 8416 | CACTGCACTCACTCCACCC | 11095 | GGGTGGAGTGAGTGCAGTG |
| 8417 | AGTGCACTCACTCCACCCA | 11096 | TGGGTGGAGTGAGTGCAGT |
| 8418 | CTGCACTCACTCCACCCAG | 11097 | CTGGGTGGAGTGAGTGCAG |
| 8419 | TGCACTCACTCCACCCAGC | 11098 | GCTGGGTGGAGTGAGTGCA |
| 8420 | GCACTCACTCCACCCAGCT | 11099 | AGCTGGGTGGAGTGAGTGC |
| 8421 | CACTCACTCCACCCAGCTC | 11100 | GAGCTGGGTGGAGTGAGTG |
| 8422 | ACTCACTCCACCCAGCTCC | 11101 | GGAGCTGGGTGGAGTGAGT |
| 8423 | CTCACTCCACCCAGCTCCA | 11102 | TGGAGCTGGGTGGAGTGAG |
| 8424 | TCACTCCACCCAGCTCCAG | 11103 | CTGGAGCTGGGTCGAGTGA |
| 8425 | CACTCCACCCAGCTCCAGG | 11104 | CCTGGAGCTGGGTGGAGTG |
| 8426 | ACTCCACCCAGCTCCAGGC | 11105 | GCCTGGAGCTGGGTGGAGT |
| 8427 | CTCCACCCAGCTCCAGGCC | 11106 | GGCCTGGAGCTGGGTGGAG |
| 8428 | TCCACCCAGCTCCAGGCCC | 11107 | GGGCCTGGAGCTGGGTGGA |
| 8429 | CCACCCAGCTCCAGGCCCC | 11108 | GGGGCCTGGAGCTGGGTGG |
| 8430 | CACCCAGCTCCAGGCCCCA | 11109 | TGGGGCCTGGAGCTGGGTG |
| 8431 | ACCCAGCTCCAGGCCCCAT | 11110 | ATGGGGCCTGGAGCTGGGT |
| 8432 | CCCAGCTCCAGGCCCCATT | 11111 | AATGGGGCCTGGAGCTGGG |
| 8433 | CCAGCTCCAGGCCCCATTC | 11112 | GAATGGGGCCTGGAGCTGG |
| 8434 | CAGCTCCAGGCCCCATTCC | 11113 | GGAATGGGGCCTGGAGCTG |
| 8435 | AGCTCCAGGCCCCATTCCT | 11114 | AGGAATGGGGCCTGGAGCT |
| 8436 | GCTCCAGGCCCCATTCCTG | 11115 | CAGGAATGGGGCCTGGAGC |
| 8437 | CTCCAGGCCCCATTCCTGG | 11116 | CCAGGAATGGGGCCTGGAG |
| 8438 | TCCAGGCCCCATTCCTGGC | 11117 | GCCAGGAATGGGGCCTGGA |
| 8439 | CCAGGCCCCATTCCTGGCA | 11118 | TGCCAGGAATGGGGCCTGG |
| 8440 | CAGGCCCCATTCCTGGCAA | 11119 | TTGCCAGGAATGGGGCCTG |
| 8441 | AGGCCCCATTCCTGGCAAG | 11120 | CTTGCCAGGAATGGGGCCT |
| 8442 | GGCCCCATTCCTGGCAAGA | 11121 | TCTTGCCAGGAATGGGGCC |
| 8443 | GCCCCATTCCTGGCAAGAA | 11122 | TTCTTGCCAGGAATGGGGC |
| 8444 | CCCCATTCCTGGCAAGAAC | 11123 | GTTCTTGCCAGGAATGGGG |
| 8445 | CCCATTCCTGGCAAGAACC | 11124 | GGTTCTTGCCAGGAATGGG |
| 8446 | CCATTCCTGGCAAGAACCC | 11125 | GGGTTCTTGCCAGGAATGG |
| 8447 | CATTCCTGGCAAGAACCCC | 11126 | GGGGTTCTTGCCAGGAATG |
| 8448 | ATTCCTGGCAAGAACCCCC | 11127 | GGGGGTTCTTGCCAGGAAT |
| 8449 | TTCCTGGCAAGAACCCCCT | 11128 | AGGGGGTTCTTGCCAGGAA |
| 8450 | TCCTGGCAAGAACCCCCTG | 11129 | CAGGGGGTTCTTGCCAGGA |
| 8451 | CCTGGCAAGAACCCCCTGC | 11130 | GCAGGGGGTTCTTGCCAGG |
| 8452 | CTGGCAAGAACCCCCTGCA | 11131 | TGCAGGGGGTTCTTGCCAG |
| 8453 | TGGCAAGAACCCCCTGCAG | 11132 | CTGCAGGGGGTTCTTGCCA |
| 8454 | GGCAAGAACCCCCTGCAGG | 11133 | CCTGCAGGGGGTTCTTGCC |
| 8455 | GCAAGAACCCCCTGCAGGA | 11134 | TCCTGCAGGGGGTTCTTGC |
| 8456 | CAAGAACCCCCTGCAGGAC | 11135 | GTCCTGCAGGGGGTTCTTG |
| 8457 | AAGAACCCCCTGCAGGACC | 11136 | GGTCCTGCAGGGGGTTCTT |
| 8458 | AGAACCCCCTGCAGGACCT | 11137 | AGGTCCTGCAGGGGGTTCT |
| 8459 | GAACCCCCTGCAGGACCTA | 11138 | TAGGTCCTGCAGGGGGTTC |
| 8460 | AACCCCCTGCAGGACCTAC | 11139 | GTAGGTCCTGCAGGGGGTT |
| 8461 | ACCCCCTGCAGGACCTACT | 11140 | AGTAGGTCCTGCAGGGGGT |
| 8462 | CCCCCTGCAGGACCTACTT | 11141 | AAGTAGGTCCTGCAGGGGG |
| 8463 | CCCCTGCAGGACCTACTTA | 11142 | TAAGTAGGTCCTGCAGGGG |
| 8464 | CCCTGCAGGACCTACTTAT | 11143 | ATAAGTAGGTCCTGCAGGG |
| 8465 | CCTGCAGGACCTACTTATG | 11144 | CATAAGTAGGTGGTGCAGG |
| 8466 | CTGCAGGACCTACTTATGG | 11145 | CCATAAGTAGGTCCTGCAG |
| 8467 | TGCAGGACCTACTTATGGG | 11146 | CCCATAAGTAGGTCCTGCA |
| 8468 | GCAGGACCTACTTATGGGG | 11147 | CCCCATAAGTAGGTCCTGC |
| 8469 | CAGGACCTACTTATGGGGC | 11148 | GCCCCATAAGTAGGTCCTG |
| 8470 | AGGACCTACTTATGGGGCA | 11149 | TGCCCCATAAGTAGGTCCT |
| 8471 | GGACCTACTTATGGGGCAC | 11150 | GTGCCCCATAAGTAGGTCC |
| 8472 | GACCTACTTATGGGGCAGA | 11151 | TGTGCCCCATAAGTAGGTC |
| 8473 | ACCTACTTATGGGGCACAC | 11152 | GTGTGCCCCATAAGTAGGT |
| 8474 | CCTACTTATGGGGCACACA | 11153 | TGTGTGCCCCATAAGTAGG |
| 8475 | CTACTTATGGGGCACACAC | 11154 | GTGTGTGCCCCATAAGTAG |
| 8476 | TACTTATGGGGCACACACC | 11155 | GGTGTGTGCCCCATAAGTA |
| 8477 | ACTTATGGGGCACACACCC | 11156 | GGGTGTGTGCCCCATAAGT |
| 8478 | CTTATGGGGCACACACCCT | 11157 | AGGGTGTGTGCCCCATAAG |
| 8479 | TTATGGGGCACACACCCTC | 11158 | GAGGGTGTGTGCCCCATAA |
| 8480 | TATGGGGCACACACCCTCC | 11159 | GGAGGGTGTGTGCCCCATA |
| 8481 | ATGGGGCACACACCCTCCT | 11160 | AGGAGGGTGTGTGCCCCAT |
| 8482 | TGGGGCACACACCCTCCTG | 11161 | CAGGAGGGTGTGTGCCCCA |
| 8483 | GGGGCACACACCCTCCTGC | 11162 | GCAGGAGGGTGTGTGCCCC |
| 8484 | GGGCACACACCCTCCTGCT | 11163 | AGCAGGAGGGTGTGTGCCC |
| 8485 | GGCACACACCCTCCTGCTA | 11164 | TAGCAGGAGGGTGTGTGCC |
| 8486 | GCACACACCCTCCTGCTAT | 11165 | ATAGCAGGAGGGTGTGTGC |
| 8487 | CACACACCCTCCTGCTATG | 11166 | CATAGCAGGAGGGTGTGTG |
| 8488 | ACACACCCTCCTGCTATGG | 11167 | CCATAGCAGGAGGGTGTGT |
| 8489 | CACACCCTCCTGCTATGGG | 11168 | CCCATAGCAGGAGGGTGTG |
| 8490 | ACACCCTCCTGCTATGGGC | 11169 | GCCCATAGCAGGAGGGTGT |
| 8491 | CACCCTCCTGCTATGGGCA | 11170 | TGCCCATAGCAGGAGGGTG |
| 8492 | ACCCTCCTGCTATGGGCAG | 11171 | CTGCCCATAGCAGGAGGGT |
| 8493 | CCCTCCTGCTATGGGCAGA | 11172 | TCTGCCCATAGCAGGAGGG |
| 8494 | CCTCCTGCTATGGGCAGAC | 11173 | GTCTGCCCATAGCAGGAGG |
| 8495 | CTCCTGCTATGGGCAGACA | 11174 | TGTCTGCCCATAGCAGGAG |
| 8496 | TCCTGCTATGGGCAGACAT | 11175 | ATGTCTGCCCATAGCAGGA |
| 8497 | CCTGCTATGGGCAGACATA | 11176 | TATGTCTGCCCATAGCAGG |
| 8498 | CTGCTATGGGCAGACATAC | 11177 | GTATGTCTGCCCATAGCAG |
| 8499 | TGCTATGGGCAGACATACT | 11178 | AGTATGTCTGCCCATAGCA |
| 8500 | GCTATGGGCAGACATACTT | 11179 | AAGTATGTCTGCCCATAGC |
| 8501 | CTATGGGCAGACATACTTG | 11180 | CAAGTATGTCTGCCCATAG |
| 8502 | TATGGGCAGACATACTTGC | 11181 | GCAAGTATGTCTGCCCATA |
| 8503 | ATGGGCAGACATACTTGCA | 11182 | TGCAAGTATGTCTGCCCAT |
| 8504 | TGGGCAGACATACTTGCAC | 11183 | GTGCAAGTATGTCTGCCCA |
| 8505 | GGGCAGACATACTTGCACC | 11184 | GGTGCAAGTATGTCTGCCC |
| 8506 | GGCAGACATAGTTGCACCT | 11185 | AGGTGCAAGTATGTCTGCC |
| 8507 | GCAGACATACTTGCACCTC | 11186 | GAGGTGCAAGTATGTCTGC |
| 8508 | CAGACATACTTGCACCTCT | 11187 | AGAGGTGCAAGTATGTCTG |
| 8509 | AGACATACTTGCACCTCTC | 11188 | GAGAGGTGCAAGTATGTCT |
| 8510 | GACATACTTGCACCTCTCA | 11189 | TGAGAGGTGCAAGTATGTC |
| 8511 | ACATACTTGCACCTCTCAC | 11190 | GTGAGAGGTGCAAGTATGT |
| 8512 | CATACTTGCACCTCTCACC | 11191 | GGTGAGAGGTGCAAGTATG |
| 8513 | ATACTTGCACCTCTCACCA | 11192 | TGGTGAGAGGTGCAAGTAT |
| 8514 | TACTTGCACCTCTCACCAG | 11193 | CTGGTGAGAGGTGCAAGTA |
| 8515 | ACTTGCACCTCTCACCAGG | 11194 | CCTGGTGAGAGGTGCAAGT |
| 8516 | CTTGCACCTCTCACCAGGC | 11195 | GCCTGGTGAGAGGTGCAAG |
| 8517 | TTGCACCTCTCAGCAGGCC | 11196 | GGCCTGGTGAGAGGTGCAA |
| 8518 | TGCACCTCTCACCAGGCCT | 11197 | AGGCCTGGTGAGAGGTGCA |
| 8519 | GCACCTCTCACCAGGCCTG | 11198 | CAGGCCTGGTGAGAGGTGC |
| 8520 | CACCTCTCACCAGGCCTGG | 11199 | CCAGGCCTGGTGAGAGGTG |
| 8521 | ACCTCTCACCAGGCCTGGC | 11200 | GCCAGGCCTGGTGAGAGGT |
| 8522 | CCTCTCACCAGGCCTGGCC | 11201 | GGCCAGGCCTGGTGAGAGG |
| 8523 | CTCTCACCAGGCCTGGCCC | 11202 | GGGCCAGGCCTGGTGAGAG |
| 8524 | TCTCACCAGGCCTGGCCCC | 11203 | GGGGCCAGGCCTGGTGAGA |
| 8525 | CTCACCAGGCCTGGCCCCT | 11204 | AGGGGCCAGGCCTGGTGAG |
| 8526 | TCACCAGGCCTGGCCCCTC | 11205 | GAGGGGCCAGGCCTGGTGA |
| 8527 | CACCAGGCCTGGCCCCTCC | 11206 | GGAGGGGCCAGGCCTGGTG |
| 8528 | ACCAGGCCTGGCCCCTCCT | 11207 | AGGAGGGGCCAGGCCTGGT |
| 8529 | CCAGGCCTGGCCCCTCCTG | 11208 | CAGGAGGGGCCAGGCCTGG |
| 8530 | CAGGCCTGGCCCCTCCTGG | 11209 | CCAGGAGGGGCCAGGCCTG |
| 8531 | AGGCCTGGCCCCTCCTGGA | 11210 | TCCAGGAGGGGCCAGGCCT |
| 8532 | GGCCTGGCCCCTCCTGGAC | 11211 | GTCCAGGAGGGGCCAGGCC |
| 8533 | GCCTGGCCCCTCCTGGACC | 11212 | GGTCCAGGAGGGGCCAGGC |
| 8534 | CCTGGCCCCTCCTGGACCC | 11213 | GGGTCCAGGAGGGGCCAGG |
| 8535 | CTGGCCCCTCCTGGACCCC | 11214 | GGGGTCCAGGAGGGGCCAG |
| 8536 | TGGCCCCTCCTGGACCCCC | 11215 | GGGGGTCCAGGAGGGGCCA |
| 8537 | GGCCCCTCCTGGACCCCCG | 11216 | CGGGGGTCCAGGAGGGGCC |
| 8538 | GCCCCTCCTGGACCCCCGC | 11217 | GCGGGGGTCCAGGAGGGGC |
| 8539 | CCCCTCCTGGACCCCCGCA | 11218 | TGCGGGGGTCCAGGAGGGG |
| 8540 | CCCTCCTGGACCCCCGCAG | 11219 | CTGCGGGGGTCCAGGAGGG |
| 8541 | CCTCCTGGACCCCCGCAGC | 11220 | GCTGCGGGGGTCCAGGAGG |
| 8542 | CTCCTGGACCCCCGCAGCC | 11221 | GGCTGCGGGGGTCCAGGAG |
| 8543 | TCCTGGACCCCCGCAGGCA | 11222 | TGGCTGCGGGGGTGCAGGA |
| 8544 | CCTGGAGCCCCGCAGCCAT | 11223 | ATGGCTGCGGGGGTCCAGG |
| 8545 | CTGGACCCCCGCAGCCATT | 11224 | AATGGCTGCGGGGGTCCAG |
| 8546 | TGGACCCCCGCAGCCATTG | 11225 | CAATGGCTGCGGGGGTCCA |
| 8547 | GGACCCCCGCAGCCATTGT | 11226 | ACAATGGCTGCGGGGGTCC |
| 8548 | GACCCCCGCAGCCATTGTT | 11227 | AACAATGGCTGCGGGGGTC |
| 8549 | ACCCCCGCAGCCATTGTTC | 11228 | GAACAATGGCTGCGGGGGT |
| 8550 | CCCCCGCAGCCATTGTTCC | 11229 | GGAACAATGGCTGCGGGGG |
| 8551 | CCCCGCAGCCATTGTTCCC | 11230 | GGGAACAATGGCTGCGGGG |
| 8552 | CCCGCAGCCATTGTTCCCA | 11231 | TGGGAACAATGGCTGCGGG |
| 8553 | CCGCAGCCATTGTTCCCAC | 11232 | GTGGGAACAATGGCTGCGG |
| 8554 | CGCAGCCATTGTTCCCACA | 11233 | TGTGGGAACAATGGCTGCG |
| 8555 | GCAGCCATTGTTCCCACAG | 11234 | CTGTGGGAACAATGGCTGC |
| 8556 | CAGCCATTGTTCCCACAGC | 11235 | GCTGTGGGAACAATGGCTG |
| 8557 | AGCCATTGTTCCCACAGCC | 11236 | GGCTGTGGGAACAATGGCT |
| 8558 | GCCATTGTTCCCACAGCCG | 11237 | CGGCTGTGGGAACAATGGC |
| 8559 | CCATTGTTCCCACAGCCGG | 11238 | CCGGCTGTGGGAACAATGG |
| 8560 | CATTGTTCCCACAGCCGGA | 11239 | TCCGGCTGTGGGAACAATG |
| 8561 | ATTGTTCCCACAGCCGGAC | 11240 | GTCCGGCTGTGGGAACAAT |
| 8562 | TTGTTCCCACAGCCGGACG | 11241 | CGTCCGGCTGTGGGAACAA |
| 8563 | TGTTCCCACAGCCGGACGG | 11242 | CCGTCCGGCTGTGGGAACA |
| 8564 | GTTCCCACAGCCGGACGGG | 11243 | CCCGTCCGGCTGTGGGAAC |
| 8565 | TTCCCACAGCCGGACGGGC | 11244 | GCCCGTCCGGCTGTGGGAA |
| 8566 | TCCCACAGCCGGACGGGCA | 11245 | TGCCCGTCCGGCTGTGGGA |
| 8567 | CCCACAGCCGGACGGGCAC | 11246 | GTGCCCGTCCGGCTGTGGG |
| 8568 | CCACAGCCGGACGGGCACC | 11247 | GGTGCCCGTCCGGCTGTGG |
| 8569 | CACAGCCGGACGGGCACCT | 11248 | AGGTGCCCGTCCGGCTGTG |
| 8570 | ACAGCCGGACGGGCACCTT | 11249 | AAGGTGCCCGTCCGGCTGT |
| 8571 | CAGCCGGACGGGCACCTTG | 11250 | CAAGGTGCCCGTCCGGCTG |
| 8572 | AGCCGGACGGGCACCTTGA | 11251 | TCAAGGTGCCCGTCCGGCT |
| 8573 | GCCGGACGGGCACCTTGAG | 11252 | CTCAAGGTGCCCGTCCGGC |
| 8574 | CCGGACGGGCACCTTGAGC | 11253 | GCTCAAGGTGCCCGTCCGG |
| 8575 | CGGACGGGCACCTTGAGCT | 11254 | AGCTCAAGGTGCCCGTCCG |
| 8576 | GGACGGGCACCTTGAGCTG | 11255 | CAGCTCAAGGTGCCCGTCC |
| 8577 | GACGGGCACCTTGAGCTGC | 11256 | GCAGCTCAAGGTGCCCGTC |
| 8578 | ACGGGCACCTTGAGCTGCG | 11257 | CGCAGCTCAAGGTGCCCGT |
| 8579 | CGGGCACCTTGAGCTGCGG | 11258 | CCGCAGCTCAAGGTGCCCG |
| 8580 | GGGCACCTTGAGCTGCGGG | 11259 | CCCGCAGCTCAAGGTGCCC |
| 8581 | GGCACCTTGAGCTGCGGGC | 11260 | GCCCGCAGCTCAAGGTGCC |
| 8582 | GCACCTTGAGCTGCGGGCC | 11261 | GGCCCGCAGCTCAAGGTGC |
| 8583 | CACCTTGAGCTGCGGGCCC | 11262 | GGGCCCGCAGCTCAAGGTG |
| 8584 | ACCTTGAGCTGCGGGCCCA | 11263 | TGGGCCCGCAGCTCAAGGT |
| 8585 | CCTTGAGCTGCGGGCCCAG | 11264 | CTGGGCCCGCAGCTCAAGG |
| 8586 | CTTGAGCTGCGGGCCGAGC | 11265 | GCTGGGCCCGCAGCTCAAG |
| 8587 | TTGAGCTGCGGGCCCAGCC | 11266 | GGCTGGGCCCGCAGCTCAA |
| 8588 | TGAGCTGCGGGCCCAGCCA | 11267 | TGGCTGGGCCCGCAGCTCA |
| 8589 | GAGCTGCGGGCCCAGCCAG | 11268 | CTGGCTGGGCCCGCAGCTC |
| 8590 | AGGTGCGGGCCCAGCCAGG | 11269 | CCTGGCTGGGCCCGCAGCT |
| 8591 | GCTGCGGGCCCAGCCAGGC | 11270 | GCCTGGCTGGGCCCGCAGC |
| 8592 | CTGCGGGCCCAGCCAGGCA | 11271 | TGCCTGGCTGGGCCCGCAG |
| 8593 | TGCGGGCCCAGCCAGGCAC | 11272 | GTGCCTGGCTGGGCCCGCA |
| 8594 | GCGGGCCCAGCCAGGCACC | 11273 | GGTGCCTGGCTGGGCCCGC |
| 8595 | CGGGCCCAGCCAGGCACCC | 11274 | GGGTGCCTGGCTGGGCCCG |
| 8596 | GGGCCCAGCCAGGCACCCG | 11275 | GGGGTGCCTGGCTGGGCCC |
| 8597 | GGCCCAGCCAGGCACCCCC | 11276 | GGGGGTGCCTGGCTGGGCC |
| 8598 | GCCCAGCCAGGCACCCCCC | 11277 | GGGGGGTGCCTGGCTGGGC |
| 8599 | CCCAGCCAGGCACCCCCCA | 11278 | TGGGGGGTGCCTGGCTGGG |
| 8600 | CCAGCCAGGCACCCCCCAG | 11279 | CTGGGGGGTGCCTGGCTGG |
| 8601 | CAGCCAGGCACCCCCCAGG | 11280 | CCTGGGGGGTGCCTGGCTG |
| 8602 | AGCCAGGCACCCCCCAGGA | 11281 | TCCTGGGGGGTGCCTGGCT |
| 8603 | GCCAGGCACCCCCCAGGAC | 11282 | GTCCTGGGGGGTGCCTGGC |
| 8604 | CCAGGCACCCCCCAGGACT | 11283 | AGTCCTGGGGGGTGCCTGG |
| 8605 | CAGGCACCCCCCAGGACTC | 11284 | GAGTCCTGGGGGGTGCCTG |
| 8606 | AGGCACCCCCCAGGACTCG | 11285 | CGAGTCCTGGGGGGTGCCT |
| 8607 | GGCACCCCCCAGGACTCGC | 11286 | GCGAGTCCTGGGGGGTGCC |
| 8608 | GCACCCCCCAGGACTCGCC | 11287 | GGCGAGTCCTGGGGGGTGC |
| 8609 | CACCCCCCAGGACTCGCCT | 11288 | AGGCGAGTCCTGGGGGGTG |
| 8610 | ACCCCCCAGGACTCGCCTC | 11289 | GAGGCGAGTCCTGGGGGGT |
| 8611 | CCCCCCAGGACTCGCCTCT | 11290 | AGAGGCGAGTCCTGGGGGG |
| 8612 | CCCCCAGGACTCGCCTCTG | 11291 | CAGAGGCGAGTCCTGGGGG |
| 8613 | CCCCAGGACTCGCCTCTGC | 11292 | GCAGAGGCGAGTCCTGGGG |
| 8614 | CCCAGGACTCGCCTCTGCC | 11293 | GGCAGAGGCGAGTCCTGGG |
| 8615 | CCAGGACTCGCCTCTGCCT | 11294 | AGGCAGAGGCGAGTCCTGG |
| 8616 | CAGGACTCGCCTCTGCCTG | 11295 | CAGGCAGAGGCGAGTCCTG |
| 8617 | AGGACTCGCCTCTGCCTGC | 11296 | GCAGGCAGAGGCGAGTCCT |
| 8618 | GGACTCGCCTCTGCCTGCC | 11297 | GGCAGGCAGAGGGGAGTCC |
| 8619 | GACTCGCCTCTGCCTGCCC | 11298 | GGGCAGGCAGAGGCGAGTC |
| 8620 | ACTCGCCTCTGCCTGCCCA | 11299 | TGGGCAGGCAGAGGCGAGT |
| 8621 | CTCGCCTCTGCCTGCCCAC | 11300 | GTGGGCAGGCAGAGGCGAG |
| 8622 | TCGCCTCTGCCTGCCCACA | 11301 | TGTGGGCAGGCAGAGGCGA |
| 8623 | CGCCTCTGCCTGCCCACAC | 11302 | GTGTGGGCAGGCAGAGGCG |
| 8624 | GCCTCTGCCTGCCCACACC | 11303 | GGTGTGGGCAGGCAGAGGC |
| 8625 | CCTCTGCCTGCCCACACCC | 11304 | GGGTGTGGGCAGGCAGAGG |
| 8626 | CTCTGCCTGCCCACACCCC | 11305 | GGGGTGTGGGCAGGCAGAG |
| 8627 | TCTGCCTGCCCACACCCCA | 11306 | TGGGGTGTGGGCAGGCAGA |
| 8628 | CTGCCTGCCCACACCCCAC | 11307 | GTGGGGTGTGGGCAGGCAG |
| 8629 | TGCCTGCCCACACCCGACC | 11308 | GGTGGGGTGTGGGCAGGCA |
| 8630 | GCCTGCCCACACCCCACCC | 11309 | CGGTGGGGTGTGGGCAGGC |
| 8631 | CCTGCCCACACCCCACCCA | 11310 | TGGGTGGGGTGTGGGCAGG |
| 8632 | CTGCCCACACCCCACCCAG | 11311 | CTGGGTGGGGTGTGGGCAG |
| 8633 | TGCCCACACCCCACCCAGC | 11312 | GCTGGGTGGGGTGTGGGCA |
| 8634 | GCCCACACCCCACCCAGCC | 11313 | GGCTGGGTGGGGTGTGGGC |
| 8635 | CCCACACCCCACCCAGCCA | 11314 | TGGCTGGGTGGGGTGTGGG |
| 8636 | CCACACCCCACCCAGCCAC | 11315 | GTGGCTGGGTGGGGTGTGG |
| 8637 | CACACCCCACCCAGCCACA | 11316 | TGTGGCTGGGTGGGGTGTG |
| 8638 | ACACCCCACCCAGCCACAG | 11317 | CTGTGGCTGGGTGGGGTGT |
| 8639 | CACCCCACCCAGCCACAGT | 11318 | ACTGTGGCTGGGTGGGGTG |
| 8640 | ACCCCACCCAGCCACAGTG | 11319 | CACTGTGGCTGGGTGGGGT |
| 8641 | CCCCACCCAGCCACAGTGC | 11320 | GCACTGTGGCTGGGTGGGG |
| 8642 | CCCACCCAGCCACAGTGCC | 11321 | GGCACTGTGGCTGGGTGGG |
| 8643 | CCACCCAGCCACAGTGCCA | 11322 | TGGCACTGTGGCTGGGTGG |
| 8644 | CACCCAGCCACAGTGCCAA | 11323 | TTGGCACTGTGGCTGGGTG |
| 8645 | ACCCAGCCACAGTGCCAAG | 11324 | CTTGGCACTGTGGCTGGGT |
| 8646 | CCGAGCCACAGTGCCAAGC | 11325 | GCTTGGCACTGTGGCTGGG |
| 8647 | CCAGCCACAGTGCCAAGCT | 11326 | AGCTTGGCACTGTGGCTGG |
| 8648 | CAGCCACAGTGCCAAGCTA | 11327 | TAGCTTGGCACTGTGGCTG |
| 8649 | AGCCACAGTGCCAAGCTAC | 11328 | GTAGCTTGGCACTGTGGCT |
| 8650 | GCCACAGTGCCAAGCTACT | 11329 | AGTAGCTTGGCACTGTGGC |
| 8651 | CCACAGTGCCAAGCTACTG | 11330 | CAGTAGCTTGGCACTGTGG |
| 8652 | CACAGTGCCAAGCTACTGG | 11331 | CCAGTAGCTTGGGACTGTG |
| 8653 | ACAGTGCCAAGCTACTGGC | 11332 | GCCAGTAGCTTGGCACTGT |
| 8654 | CAGTGCCAAGCTACTGGCC | 11333 | GGCCAGTAGCTTGGCACTG |
| 8655 | AGTGCCAAGCTACTGGCCG | 11334 | CGGCCAGTAGCTTGGCACT |
| 8656 | GTGCCAAGCTACTGGCCGA | 11335 | TCGGCCAGTAGCTTGGCAC |
| 8657 | TGCCAAGCTACTGGCCGAG | 11336 | CTCGGCCAGTAGCTTGGCA |
| 8658 | GCCAAGCTACTGGCCGAGC | 11337 | GCTCGGCCAGTAGCTTGGC |
| 8659 | CCAAGCTACTGGCCGAGCC | 11338 | GGCTCGGCCAGTAGCTTGG |
| 8660 | CAAGCTACTGGCCGAGCCT | 11339 | AGGCTCGGCCAGTAGCTTG |
| 8661 | AAGCTACTGGCCGAGCCTT | 11340 | AAGGCTCGGCCAGTAGCTT |
| 8662 | AGCTACTGGCCGAGCCTTC | 11341 | GAAGGCTCGGCCAGTAGCT |
| 8663 | GCTACTGGCCGAGCCTTCC | 11342 | GGAAGGCTCGGCCAGTAGC |
| 8664 | CTACTGGCCGAGCCTTCCC | 11343 | GGGAAGGCTCGGCCAGTAG |
| 8665 | TACTGGCCGAGCCTTCCCC | 11344 | GGGGAAGGCTCGGCCAGTA |
| 8666 | ACTGGCCGAGGCTTCCCCA | 11345 | TGGGGAAGGCTCGGCCAGT |
| 8667 | CTGGCCGAGCCTTCCCCAG | 11346 | CTGGGGAAGGCTCGGCCAG |
| 8668 | TGGCCGAGCCTTCCCCAGC | 11347 | GCTGGGGAAGGCTCGGCCA |
| 8669 | GGCCGAGCCTTCCCCAGCC | 11348 | GGCTGGGGAAGGCTCGGCC |
| 8670 | GCCGAGCCTTCCCCAGCCA | 11349 | TGGCTGGGGAAGGCTCGGC |
| 8671 | CCGAGCCTTCCCCAGCCAG | 11350 | CTGGCTGGGGAAGGCTCGG |
| 8672 | CGAGCCTTCCCCAGCCAGG | 11351 | CCTGGCTGGGGAAGGCTCG |
| 8673 | GAGCCTTCCCCAGCCAGGA | 11352 | TCCTGGCTGGGGAAGGCTC |
| 8674 | AGCCTTCCCCAGCCAGGAC | 11353 | GTCCTGGCTGGGGAAGGCT |
| 8675 | GCCTTCCCCAGCCAGGACT | 11354 | AGTCCTGGCTGGGGAAGGC |
| 8676 | CCTTCCCCAGCCAGGACTA | 11355 | TAGTCCTGGCTGGGGAAGG |
| 8677 | CTTCCCCAGCCAGGACTAT | 11356 | ATAGTCCTGGCTGGGGAAG |
| 8678 | TTCCCCAGCCAGGACTATG | 11357 | CATAGTCCTGGCTGGGGAA |
| 8679 | TCCCCAGCCAGGACTATGC | 11358 | GCATAGTCCTGGCTGGGGA |
| 8680 | CCCCAGCCAGGACTATGCA | 11359 | TGCATAGTCCTGGCTGGGG |
| 8681 | CCCAGCCAGGACTATGCAC | 11360 | GTGCATAGTCCTGGCTGGG |
| 8682 | CCAGCCAGGACTATGCACG | 11361 | CGTGCATAGTCCTGGCTGG |
| 8683 | CAGCCAGGACTATGCACGA | 11362 | TCGTGCATAGTCCTGGCTG |
| 8684 | AGCCAGGACTATGCACGAC | 11363 | GTCGTGCATAGTCCTGGCT |
| 8685 | GCCAGGACTATGCACGACA | 11364 | TGTCGTGCATAGTCCTGGC |
| 8686 | CCAGGACTATGCACGACAC | 11365 | GTGTCGTGCATAGTCCTGG |
| 8687 | CAGGACTATGCACGACACC | 11366 | GGTGTCGTGCATAGTCCTG |
| 8688 | AGGACTATGCACGACACCC | 11367 | GGGTGTCGTGCATAGTCCT |
| 8689 | GGACTATGCACGACACCCT | 11368 | AGGGTGTCGTGCATAGTCC |
| 8690 | GACTATGCACGACACCCTG | 11369 | CAGGGTGTCGTGCATAGTC |
| 8691 | ACTATGCACGACACCCTGC | 11370 | GCAGGGTGTCGTGCATAGT |
| 8692 | CTATGCACGACACCCTGCT | 11371 | AGCAGGGTGTCGTGCATAG |
| 8693 | TATGCACGACACCCTGCTG | 11372 | CAGCAGGGTGTCGTGCATA |
| 8694 | ATGCACGACACCCTGCTGC | 11373 | GCAGCAGGGTGTCGTGCAT |
| 8695 | TGCACGACACCCTGCTGCC | 11374 | GGCAGCAGGGTGTGGTGCA |
| 8696 | GCACGACACCCTGCTGCCA | 11375 | TGGCAGCAGGGTGTCGTGC |
| 8697 | CACGACACCCTGCTGCCAG | 11376 | CTGGCAGCAGGGTGTCGTG |
| 8698 | ACGACACCCTGCTGCCAGA | 11377 | TCTGGCAGCAGGGTGTCGT |
| 8699 | CGACACCCTGCTGCCAGAT | 11378 | ATCTGGCAGCAGGGTGTCG |
| 8700 | GACACCCTGCTGCCAGATG | 11379 | CATCTGGCAGCAGGGTGTC |
| 8701 | ACACCCTGCTGCCAGATGG | 11380 | CCATCTGGCAGCAGGGTGT |
| 8702 | CACCCTGCTGCCAGATGGA | 11381 | TCCATCTGGCAGCAGGGTG |
| 8703 | ACCCTGCTGCCAGATGGAG | 11382 | CTCCATCTGGCAGCAGGGT |
| 8704 | CCCTGCTGCCAGATGGAGA | 11383 | TCTCCATCTGGCAGCAGGG |
| 8705 | CCTGCTGCCAGATGGAGAC | 11384 | GTCTCCATCTGGCAGCAGG |
| 8706 | CTGCTGCCAGATGGAGACC | 11385 | GGTCTCCATCTGGCAGCAG |
| 8707 | TGCTGCCAGATGGAGACCT | 11386 | AGGTCTCCATCTGGCAGCA |
| 8708 | GCTGCCAGATGGAGACCTT | 11387 | AAGGTCTCCATCTGGCAGC |
| 8709 | CTGCCAGATGGAGACCTTG | 11388 | CAAGGTCTCCATCTGGCAG |
| 8710 | TGCCAGATGGAGACCTTGG | 11389 | CCAAGGTCTCCATCTGGCA |
| 8711 | GCCAGATGGAGACCTTGGC | 11390 | GCCAAGGTCTCCATCTGGC |
| 8712 | CCAGATGGAGACCTTGGCA | 11391 | TGCCAAGGTCTCCATCTGG |
| 8713 | CAGATGGAGACCTTGGCAC | 11392 | GTGCCAAGGTCTCCATCTG |
| 8714 | AGATGGAGACCTTGGCACT | 11393 | AGTGCCAAGGTCTCCATCT |
| 8715 | GATGGAGACCTTGGCACTG | 11394 | CAGTGCCAAGGTCTCCATC |
| 8716 | ATGGAGACCTTGGCACTGA | 11395 | TCAGTGCCAAGGTCTCCAT |
| 8717 | TGGAGACCTTGGCACTGAC | 11396 | GTCAGTGCCAAGGTCTCCA |
| 8718 | GGAGACCTTGGCACTGACC | 11397 | GGTCAGTGCCAAGGTCTCC |
| 8719 | GAGACCTTGGCACTGACCT | 11398 | AGGTCAGTGCCAAGGTCTC |
| 8720 | AGACCTTGGCACTGACCTG | 11399 | CAGGTCAGTGCCAAGGTCT |
| 8721 | GACCTTGGCACTGACCTGG | 11400 | CCAGGTCAGTGCCAAGGTC |
| 8722 | ACCTTGGCACTGACCTGGA | 11401 | TCCAGGTCAGTGCCAAGGT |
| 8723 | CCTTGGCACTGACCTGGAT | 11402 | ATCCAGGTCAGTGCCAAGG |
| 8724 | CTTGGCACTGACCTGGATG | 11403 | CATCCAGGTCAGTGCCAAG |
| 8725 | TTGGCACTGACCTGGATGC | 11404 | GCATCCAGGTCAGTGCCAA |
| 8726 | TGGCACTGACCTGGATGCC | 11405 | GGCATCCAGGTCAGTGCCA |
| 8727 | GGCACTGACCTGGATGCCA | 11406 | TGGCATCCAGGTCAGTGCC |
| 8728 | GCACTGACCTGGATGCCAT | 11407 | ATGGCATCCAGGTCAGTGC |
| 8729 | CACTGACCTGGATGCCATC | 11408 | GATGGCATCCAGGTCAGTG |
| 8730 | ACTGACCTGGATGCCATCA | 11409 | TGATGGCATCCAGGTCAGT |
| 8731 | CTGACCTGGATGCCATCAA | 11410 | TTGATGGCATCCAGGTCAG |
| 8732 | TGACCTGGATGCCATCAAT | 11411 | ATTGATGGCATCCAGGTCA |
| 8733 | GACCTGGATGCCATCAATC | 11412 | GATTGATGGCATCCAGGTC |
| 8734 | ACCTGGATGCCATCAATCC | 11413 | GGATTGATGGCATCCAGGT |
| 8735 | CCTGGATGCCATCAATCCC | 11414 | GGGATTGATGGCATCCAGG |
| 8736 | CTGGATGCCATGAATCCCT | 11415 | AGGGATTGATGGCATCCAG |
| 8737 | TGGATGCCATCAATCCCTC | 11416 | GAGGGATTGATGGCATCCA |
| 8738 | GGATGCCATCAATCCCTCA | 11417 | TGAGGGATTGATGGCATCC |
| 8739 | GATGCCATCAATCCCTCAC | 11418 | GTGAGGGATTGATGGCATC |
| 8740 | ATGCCATCAATCCCTCACT | 11419 | AGTGAGGGATTGATGGCAT |
| 8741 | TGCCATCAATCCCTCACTC | 11420 | GAGTGAGGGATTGATGGCA |
| 8742 | GCCATCAATCCCTCACTCA | 11421 | TGAGTGAGGGATTGATGGC |
| 8743 | CCATCAATCCCTCACTCAC | 11422 | GTGAGTGAGGGATTGATGG |
| 8744 | CATCAATCCCTCACTCACT | 11423 | AGTGAGTGAGGGATTGATG |
| 8745 | ATCAATCCCTCACTCACTG | 11424 | CAGTGAGTGAGGGATTGAT |
| 8746 | TCAATCCCTCACTCACTGA | 11425 | TCAGTGAGTGAGGGATTGA |
| 8747 | CAATCCCTCACTCACTGAC | 11426 | GTCAGTGAGTGAGGGATTG |
| 8748 | AATCCCTCACTCACTGACT | 11427 | AGTCAGTGAGTGAGGGATT |
| 8749 | ATCCCTCACTCACTGACTT | 11428 | AAGTCAGTGAGTGAGGGAT |
| 8750 | TCCCTCACTCACTGACTTC | 11429 | GAAGTCAGTGAGTGAGGGA |
| 8751 | CCCTCACTCACTGACTTCG | 11430 | CGAAGTCAGTGAGTGAGGG |
| 8752 | CCTCACTCACTGACTTCGA | 11431 | TCGAAGTCAGTGAGTGAGG |
| 8753 | CTCACTCACTGACTTCGAC | 11432 | GTCGAAGTCAGTGAGTGAG |
| 8754 | TCACTCACTGACTTCGACT | 11433 | AGTCGAAGTCAGTGAGTGA |
| 8755 | CACTCACTGACTTCGACTT | 11434 | AAGTCGAAGTCAGTGAGTG |
| 8756 | ACTCACTGACTTCGACTTC | 11435 | GAAGTCGAAGTCAGTGAGT |
| 8757 | CTCACTGACTTCGACTTCC | 11436 | GGAAGTCGAAGTCAGTGAG |
| 8758 | TCACTGACTTCGACTTCCA | 11437 | TGGAAGTCGAAGTCAGTGA |
| 8759 | CACTGACTTCGACTTCCAG | 11438 | CTGGAAGTCGAAGTCAGTG |
| 8760 | ACTGACTTCGACTTCCAGG | 11439 | CCTGGAAGTCGAAGTCAGT |
| 8761 | CTGACTTCGACTTCCAGGG | 11440 | CCCTGGAAGTCGAAGTCAG |
| 8762 | TGACTTCGACTTCCAGGGA | 11441 | TCCCTGGAAGTCGAAGTCA |
| 8763 | GACTTCGACTTCCAGGGAA | 11442 | TTCCCTGGAAGTCGAAGTC |
| 8764 | ACTTCGACTTCCAGGGAAA | 11443 | TTTCCCTGGAAGTCGAAGT |
| 8765 | CTTCGACTTCCAGGGAAAC | 11444 | GTTTCCCTGGAAGTCGAAG |
| 8766 | TTCGACTTCCAGGGAAACC | 11445 | GGTTTCCCTGGAAGTCGAA |
| 8767 | TCGACTTCCAGGGAAACCT | 11446 | AGGTTTCCCTGGAAGTCGA |
| 8768 | CGACTTCCAGGGAAACCTG | 11447 | CAGGTTTCCCTGGAAGTCG |
| 8769 | GACTTCCAGGGAAACCTGT | 11448 | ACAGGTTTCCCTGGAAGTC |
| 8770 | ACTTCCAGGGAAACCTGTG | 11449 | CACAGGTTTCCCTGGAAGT |
| 8771 | CTTCCAGGGAAACCTGTGG | 11450 | CCACAGGTTTCCCTGGAAG |
| 8772 | TTCCAGGGAAACCTGTGGG | 11451 | CCCACAGGTTTCCCTGGAA |
| 8773 | TCCAGGGAAACCTGTGGCA | 11452 | TCCCACAGGTTTCCCTGGA |
| 8774 | CCAGGGAAACCTGTGGGAA | 11453 | TTCCCACAGGTTTCCCTGG |
| 8775 | CAGGGAAACCTGTGGGAAC | 11454 | GTTCCCACAGGTTTCCCTG |
| 8776 | AGGGAAACCTGTGGGAACA | 11455 | TGTTCCCACAGGTTTCCCT |
| 8777 | GGGAAACCTGTGGGAACAG | 11456 | CTGTTCCCACAGGTTTCCC |
| 8778 | GGAAACCTGTGGGAACAGT | 11457 | ACTGTTCCCACAGGTTTCC |
| 8779 | GAAACCTGTGGGAACAGTT | 11458 | AACTGTTCCCACAGGTTTC |
| 8780 | AAACCTGTGGGAACAGTTG | 11459 | CAACTGTTCCCACAGGTTT |
| 8781 | AACCTGTGGGAACAGTTGA | 11460 | TCAAGTGTTCCCACAGGTT |
| 8782 | ACCTGTGGGAACAGTTGAA | 11461 | TTCAACTGTTCCCACAGGT |
| 8783 | CCTGTGGGAACAGTTGAAG | 11462 | CTTCAACTGTTCCCACAGG |
| 8784 | CTGTGGGAACAGTTGAAGG | 11463 | CCTTCAACTGTTCCCACAG |
| 8785 | TGTGGGAACAGTTGAAGGA | 11464 | TCCTTCAACTGTTCCCACA |
| 8786 | GTGGGAACAGTTGAAGGAT | 11465 | ATCCTTCAACTGTTCCCAC |
| 8787 | TGGGAACAGTTGAAGGATG | 11466 | CATCCTTCAACTGTTCGCA |
| 8788 | GGGAACAGTTGAAGGATGA | 11467 | TCATCCTTCAACTGTTCCC |
| 8789 | GGAACAGTTGAAGGATGAT | 11468 | ATCATCCTTCAACTGTTCC |
| 8790 | GAACAGTTGAAGGATGATA | 11469 | TATCATCCTTCAACTGTTC |
| 8791 | AACAGTTGAAGGATGATAG | 11470 | CTATCATCCTTCAACTGTT |
| 8792 | ACAGTTGAAGGATGATAGC | 11471 | GCTATCATCCTTCAACTGT |
| 8793 | CAGTTGAAGGATGATAGCT | 11472 | AGCTATCATCCTTCAACTG |
| 8794 | AGTTGAAGGATGATAGCTT | 11473 | AAGCTATCATCCTTCAACT |
| 8795 | GTTGAAGGATGATAGCTTG | 11474 | CAAGCTATCATCCTTCAAC |
| 8796 | TTGAAGGATGATAGCTTGG | 11475 | CCAAGCTATCATCCTTCAA |
| 8797 | TGAAGGATGATAGCTTGGC | 11476 | GCCAAGCTATCATCCTTCA |
| 8798 | GAAGGATGATAGCTTGGCC | 11477 | GGCCAAGCTATCATCCTTC |
| 8799 | AAGGATGATAGCTTGGCCC | 11478 | GGGCCAAGCTATCATCCTT |
| 8800 | AGGATGATAGCTTGGCCCT | 11479 | AGGGCCAAGCTATCATCCT |
| 8801 | GGATGATAGCTTGGCCCTC | 11480 | GAGGGCCAAGCTATCATCC |
| 8802 | GATGATAGCTTGGCCCTCG | 11481 | CGAGGGCCAAGCTATCATC |
| 8803 | ATGATAGCTTGGCCCTCGA | 11482 | TCGAGGGCCAAGCTATCAT |
| 8804 | TGATAGCTTGGCCCTCGAC | 11483 | GTCGAGGGCCAAGCTATCA |
| 8805 | GATAGCTTGGCCCTCGACC | 11484 | GGTCGAGGGCCAAGCTATC |
| 8806 | ATAGCTTGGCCCTCGACCC | 11485 | GGGTCGAGGGCCAAGCTAT |
| 8807 | TAGCTTGGCCCTCGACCCC | 11486 | GGGGTCGAGGGCCAAGCTA |
| 8808 | AGCTTGGCCCTCGACGCCC | 11487 | GGGGGTCGAGGGCCAAGCT |
| 8809 | GCTTGGCCCTCGACCCCCT | 11488 | AGGGGGTCGAGGGCCAAGC |
| 8810 | CTTGGCCCTCGACCCCCTG | 11489 | CAGGGGGTCGAGGGCCAAG |
| 8811 | TTGGCCCTCGACCCCCTGG | 11490 | CCAGGGGGTCGAGGGCCAA |
| 8812 | TGGCCCTCGACCCCCTGGT | 11491 | ACCAGGGGGTCGAGGGCCA |
| 8813 | GGCCCTCGACCCCCTGGTA | 11492 | TACCAGGGGGTCGAGGGGC |
| 8814 | GCCCTCGACCCCCTGGTAC | 11493 | GTACCAGGGGGTCGAGGGC |
| 8815 | CCCTCGACCCCCTGGTACT | 11494 | AGTACCAGGGGGTCGAGGG |
| 8816 | CCTCGACCCCCTGGTACTG | 11495 | CAGTACCAGGGGGTCGAGG |
| 8817 | CTCGACCCCCTGGTACTGG | 11496 | CCAGTACCAGGGGGTCGAG |
| 8818 | TCGACCCCCTGGTACTGGT | 11497 | ACCAGTACCAGGGGGTCGA |
| 8819 | CGACCCCCTGGTACTGGTG | 11498 | CACCAGTACCAGGGGGTCG |
| 8820 | GACCCCCTGGTACTGGTGA | 11499 | TCACCAGTACCAGGGGGTC |
| 8821 | ACCCCCTGGTACTGGTGAC | 11500 | GTCACCAGTACCAGGGGGT |
| 8822 | CCCCCTGGTACTGGTGACC | 11501 | GGTCACCAGTACCAGGGGG |
| 8823 | CCCCTGGTACTGGTGACCT | 11502 | AGGTCACCAGTACCAGGGG |
| 8824 | CCCTGGTACTGGTGACCTC | 11503 | GAGGTCACCAGTACCAGGG |
| 8825 | CCTGGTACTGGTGACCTCA | 11504 | TGAGGTCACCAGTACCAGG |
| 8826 | CTGGTACTGGTGACCTCAT | 11505 | ATGAGGTCACCAGTACCAG |
| 8827 | TGGTACTGGTGACCTCATC | 11506 | GATGAGGTCACCAGTACCA |
| 8828 | GGTACTGGTGACCTCATCC | 11507 | GGATGAGGTGACCAGTACC |
| 8829 | GTACTGGTGACCTCATCCC | 11508 | GGGATGAGGTCACCAGTAC |
| 8830 | TACTGGTGACCTCATCCCC | 11509 | GGGGATGAGGTCACCAGTA |
| 8831 | ACTGGTGACCTCATCCCCG | 11510 | CGGGGATGAGGTCACCAGT |
| 8832 | CTGGTGACCTCATCCCCGA | 11511 | TCGGGGATGAGGTCACCAG |
| 8833 | TGGTGACCTCATCCCCGAC | 11512 | GTCGGGGATGAGGTCACCA |
| 8834 | GGTGACCTCATCCCCGACA | 11513 | TGTCGGGGATGAGGTCACC |
| 8835 | GTGACCTCATCCCCGACAT | 11514 | ATGTCGGGGATGAGGTCAC |
| 8836 | TGACCTCATCCCCGACATC | 11515 | GATGTCGGGGATGAGGTCA |
| 8837 | GACCTCATCCCCGACATCA | 11516 | TGATGTCGGGGATGAGGTC |
| 8838 | ACCTCATCCCCGACATCAT | 11517 | ATGATGTCGGGGATGAGGT |
| 8839 | CCTCATCCCCGACATCATC | 11518 | GATGATGTCGGGGATGAGG |
| 8840 | CTCATCCCCGACATCATCT | 11519 | AGATGATGTCGGGGATGAG |
| 8841 | TCATCCCCGACATCATCTT | 11520 | AAGATGATGTCGGGGATGA |
| 8842 | CATCCCCGACATCATCTTC | 11521 | GAAGATGATGTCGGGGATG |
| 8843 | ATCCCCGACATCATCTTCG | 11522 | CGAAGATGATGTCGGGGAT |
| 8844 | TCCCCGACATCATCTTCGA | 11523 | TCGAAGATGATGTCGGGGA |
| 8845 | CCCCGACATCATCTTCGAT | 11524 | ATCGAAGATGATGTCGGGG |
| 8846 | CCCGACATCATCTTCGATG | 11525 | CATCGAAGATGATGTCGGG |
| 8847 | CCGACATCATCTTCGATGC | 11526 | GCATCGAAGATGATGTCGG |
| 8848 | CGACATCATCTTCGATGCC | 11527 | GGCATCGAAGATGATGTCG |
| 8849 | GACATCATCTTCGATGCCA | 11528 | TGGCATCGAAGATGATGTC |
| 8850 | ACATCATCTTCGATGCCAC | 11529 | GTGGGATCGAAGATGATGT |
| 8851 | CATCATCTTCGATGCCACC | 11530 | GGTGGCATCGAAGATGATG |
| 8852 | ATCATCTTCGATGCCACCA | 11531 | TGGTGGCATCGAAGATGAT |
| 8853 | TCATCTTCGATGCCACCAC | 11532 | GTGGTGGCATCGAAGATGA |
| 8854 | CATCTTCGATGCCACCACC | 11533 | GGTGGTGGCATCGAAGATG |
| 8855 | ATCTTCGATGCCACCACCC | 11534 | GGGTGGTGGGATCGAAGAT |
| 8856 | TCTTCGATGCCACCACCCC | 11535 | GGGGTGGTGGCATCGAAGA |
| 8857 | CTTCGATGCCACCACCCCA | 11536 | TGGGGTGGTGGCATCGAAG |
| 8858 | TTCGATGCCACCACCCCAG | 11537 | CTGGGGTGGTGGCATCGAA |
| 8859 | TCGATGCCACCACCCCAGC | 11538 | GCTGGGGTGGTGGCATCGA |
| 8860 | CGATGCCACCACCCCAGCC | 11539 | GGCTGGGGTGGTGGCATCG |
| 8861 | GATGCCACCACCCCAGCCA | 11540 | TGGCTGGGGTGGTGGCATC |
| 8862 | ATGCCACCACCCCAGCCAC | 11541 | GTGGCTGGGGTGGTGGCAT |
| 8863 | TGCCACCACCCCAGCCACC | 11542 | GGTGGCTGGGGTGGTGGCA |
| 8864 | GCCACCACCCCAGCCACCA | 11543 | TGGTGGCTGGGGTGGTGGC |
| 8865 | CCACCACCCCAGCCACCAC | 11544 | GTGGTGGCTGGGGTGGTGG |
| 8866 | CACCACCCCAGCCACCACC | 11545 | GGTGGTGGCTGGGGTGGTG |
| 8867 | ACCACCCCAGCCACCACCT | 11546 | AGGTGGTGGCTGGGGTGGT |
| 8868 | CCACCCCAGCCACCACCTC | 11547 | GAGGTGGTGGCTGGGGTGG |
| 8869 | CACCCCAGCCACCACCTCA | 11548 | TGAGGTGGTGGCTGGGGTG |
| 8870 | ACCCCAGCCACCACCTCAC | 11549 | GTGAGGTGGTGGCTGGGGT |
| 8871 | CCCCAGCCACCACCTCACT | 11550 | AGTGAGGTGGTGGCTGGGG |
| 8872 | CCCAGCCACCACCTCACTG | 11551 | CAGTGAGGTGGTGGCTGGG |
| 8873 | CCAGCCACCACCTCACTGC | 11552 | GCAGTGAGGTGGTGGCTGG |
| 8874 | CAGCCACCACCTCACTGCT | 11553 | AGCAGTGAGGTGGTGGCTG |
| 8875 | AGCCACCACCTCACTGCTT | 11554 | AAGCAGTGAGGTGGTGGCT |
| 8876 | GCCACCACCTCACTGCTTC | 11555 | GAAGCAGTGAGGTGGTGGC |
| 8877 | CCACCACCTCACTGCTTCC | 11556 | GGAAGCAGTGAGGTGGTGG |
| 8878 | CACCACCTCACTGCTTCCC | 11557 | GGGAAGCAGTGAGGTGGTG |
| 8879 | ACCACCTCACTGCTTCCCC | 11558 | GGGGAAGCAGTGAGGTGGT |
| 8880 | CCACCTCACTGCTTCCCCC | 11559 | GGGGGAAGCAGTGAGGTGG |
| 8881 | CACCTCACTGCTTCCCCCC | 11560 | GGGGGGAAGCAGTGAGGTG |
| 8882 | ACCTCACTGCTTCCCCCCT | 11561 | AGGGGGGAAGCAGTGAGGT |
| 8883 | CCTCACTGCTTCCCCCCTG | 11562 | CAGGGGGGAAGCAGTGAGG |
| 8884 | CTCACTGCTTCCCCCCTGG | 11563 | CCAGGGGGGAAGCAGTGAG |
| 8885 | TCACTGCTTCCCCCCTGGG | 11564 | CCCAGGGGGGAAGCAGTGA |
| 8886 | CACTGCTTCCCCCCTGGGC | 11565 | GCCCAGGGGGGAAGCAGTG |
| 8887 | ACTGCTTCCCCCCTGGGCC | 11566 | GGCCCAGGGGGGAAGCAGT |
| 8888 | CTGCTTCCCCCCTGGGCCC | 11567 | GGGCCCAGGGGGGAAGCAG |
| 8889 | TGCTTCCCCCCTGGGCCCT | 11568 | AGGGCCCAGGGGGGAAGCA |
| 8890 | GCTTCCCCCCTGGGCCCTG | 11569 | CAGGGCCCAGGGGGGAAGC |
| 8891 | CTTCCCCCCTGGGCCCTGT | 11570 | ACAGGGCCCAGGGGGGAAG |
| 8892 | TTCCCCCCTGGGCCCTGTC | 11571 | GACAGGGCCCAGGGGGGAA |
| 8893 | TCCCCCCTGGGCCCTGTCT | 11572 | AGACAGGGCCCAGGGGGGA |
| 8894 | CCCCCCTGGGCCCTGTCTG | 11573 | CAGACAGGGCCCAGGGGGG |
| 8895 | CCCCCTGGGCCCTGTCTGA | 11574 | TCAGACAGGGCCCAGGGGG |
| 8896 | CCCCTGGGCCCTGTCTGAC | 11575 | GTCAGACAGGGCCCAGGGG |
| 8897 | CCCTGGGCCCTGTCTGACA | 11576 | TGTCAGACAGGGCCCAGGG |
| 8898 | CCTGGGCCCTGTCTGACAG | 11577 | CTGTCAGACAGGGCCCAGG |
| 8899 | CTGGGCCCTGTCTGACAGA | 11578 | TCTGTCAGACAGGGCCCAG |
| 8900 | TGGGCCCTGTCTGACAGAG | 11579 | CTCTGTCAGACAGGGCCCA |
| 8901 | GGGCCCTGTCTGACAGAGA | 11580 | TCTCTGTCAGACAGGGCCC |
| 8902 | GGCCCTGTCTGACAGAGAC | 11581 | GTCTCTGTCAGACAGGGCC |
| 8903 | GCCCTGTCTGACAGAGACA | 11582 | TGTCTCTGTCAGACAGGGC |
| 8904 | CCCTGTCTGACAGAGACAG | 11583 | CTGTCTCTGTCAGACAGGG |
| 8905 | CCTGTCTGACAGAGACAGG | 11584 | CCTGTCTCTGTCAGACAGG |
| 8906 | CTGTCTGACAGAGACAGGC | 11585 | GCGTGTCTCTGTCAGACAG |
| 8907 | TGTCTGACAGAGACAGGCA | 11586 | TGGCTGTCTCTGTCAGACA |
| 8908 | GTCTGACAGAGACAGGCAG | 11587 | CTGCCTGTCTCTGTGAGAC |
| 8909 | TCTGACAGAGACAGGCAGT | 11588 | ACTGCCTGTCTCTGTCAGA |
| 8910 | CTGACAGAGACAGGCAGTG | 11589 | CACTGCCTGTCTCTGTGAG |
| 8911 | TGACAGAGACAGGCAGTGG | 11590 | CCACTGCCTGTCTCTGTCA |
| 8912 | GACAGAGACAGGCAGTGGG | 11591 | CCCACTGCCTGTCTCTGTC |
| 8913 | ACAGAGACAGGCAGTGGGG | 11592 | CCCCACTGCCTGTCTCTGT |
| 8914 | CAGAGACAGGCAGTGGGGC | 11593 | GCCCCACTGCCTGTCTCTG |
| 8915 | AGAGACAGGCAGTGGGGCA | 11594 | TGCCCCACTGCCTGTCTCT |
| 8916 | GAGACAGGCAGTGGGGCAG | 11595 | CTGCCCCACTGCCTGTCTC |
| 8917 | AGACAGGCAGTGGGGCAGG | 11596 | CCTGCCCCACTGCCTGTCT |
| 8918 | GACAGGCAGTGGGGCAGGT | 11597 | ACCTGCCCCACTGCGTGTC |
| 8919 | ACAGGCAGTGGGGCAGGTG | 11598 | CACCTGCCCCACTGCCTGT |
| 8920 | CAGGCAGTGGGGCAGGTGA | 11599 | TCACCTGCGCCACTGCCTG |
| 8921 | AGGCAGTGGGGCAGGTGAC | 11600 | GTCACCTGCCCCACTGCCT |
| 8922 | GGCAGTGGGGCAGGTGACT | 11601 | AGTCACCTGCCCCACTGCC |
| 8923 | GCAGTGGGGCAGGTGACTT | 11602 | AAGTCACCTGCCCCACTGC |
| 8924 | CAGTGGGGCAGGTGACTTG | 11603 | CAAGTCACCTGCCCCACTG |
| 8925 | AGTGGGGCAGGTGACTTGG | 11604 | CCAAGTCACCTGCCCCACT |
| 8926 | GTGGGGCAGGTGACTTGGC | 11605 | GCCAAGTCACCTGCCCCAC |
| 8927 | TGGGGCAGGTGACTTGGCA | 11606 | TGCCAAGTCACCTGCCCCA |
| 8928 | GGGGCAGGTGACTTGGCAG | 11607 | CTGCCAAGTCACCTGCCCC |
| 8929 | GGGCAGGTGACTTGGCAGC | 11668 | GCTGCCAAGTCACCTGCCC |
| 8930 | GGCAGGTGACTTGGCAGCC | 11609 | GGCTGCCAAGTCACCTGCC |
| 8931 | GCAGGTGACTTGGCAGCCC | 11610 | GGGCTGCCAAGTCACCTGC |
| 8932 | CAGGTGACTTGGCAGCCCC | 11611 | GGGGCTGCCAAGTCACCTG |
| 8933 | AGGTGACTTGGCAGCCCCG | 11612 | CGGGGCTGCCAAGTCACCT |
| 8934 | GGTGACTTGGCAGCCCCGG | 11613 | CCGGGGCTGCCAAGTCACC |
| 8935 | GTGACTTGGCAGCCCCGGG | 11614 | CCCGGGGCTGCCAAGTCAC |
| 8936 | TGACTTGGCAGCCCCGGGC | 11615 | GCCCGGGGCTGCCAAGTCA |
| 8937 | GACTTGGCAGCCCCGGGCA | 11616 | TGCCCGGGGCTGCCAAGTC |
| 8938 | ACTTGGCACCCCCGGGCAG | 11617 | CTGCCCGGGGCTGCCAAGT |
| 8939 | CTTGGCAGCCCCGGGCAGT | 11618 | ACTGCCCGGGGCTGCCAAG |
| 8940 | TTGGCAGCCCCGGGCAGTG | 11619 | CACTGCCCGGGGCTGCCAA |
| 8941 | TGGCAGCCCCGGGCAGTGG | 11620 | CCACTGCCCGGGGCTGCCA |
| 8942 | GGCAGCCCCGGGCAGTGGT | 11621 | ACCACTGCCCGGGGCTGCC |
| 8943 | GCAGCCCCGGGCAGTGGTG | 11622 | CACCACTGCCCGGGGCTGC |
| 8944 | CAGCCCCGGGCAGTGGTGG | 11623 | CCACCACTGCCCGGGGCTG |
| 8945 | AGCCCCGGGCAGTGGTGGC | 11624 | GCCACCACTGCCCGGGGCT |
| 8946 | GCCCCGGGCAGTGGTGGCT | 11625 | AGCCACCACTGCCCGGGGC |
| 8947 | CCCCGGGCAGTGGTGGCTC | 11626 | GAGCCACCACTGCCCGGGG |
| 8948 | CCCGGGCAGTGGTGGCTCC | 11627 | GGAGCCACCACTGCCCGGG |
| 8949 | CCGGGCAGTGGTGGCTCCG | 11628 | CGGAGCCACCACTGCCCGG |
| 8950 | CGGGCAGTGGTGGCTCCGG | 11629 | CCGGAGCCACCACTGCCCG |
| 8951 | GGGCAGTGGTGGCTCCGGG | 11630 | CCCGGAGCCACCACTGCCC |
| 8952 | GGCAGTGGTGGCTCCGGGG | 11631 | CCCCGGAGCCACCACTGCC |
| 8953 | GCAGTGGTGGCTCCGGGGC | 11632 | GCCCCGGAGCCACCACTGC |
| 8954 | CAGTGGTGGCTCCGGGGCA | 11633 | TGCCCCGGAGCCACCACTG |
| 8955 | AGTGGTGGCTCCGGGGCAC | 11634 | GTGCCCCGGAGCCACCACT |
| 8956 | GTGGTGGCTCCGGGGCACT | 11635 | AGTGCCCCGGAGCCACCAC |
| 8957 | TGGTGGCTCCGGGGCACTG | 11636 | CAGTGCCCCGGAGCCACCA |
| 8958 | GGTGGCTCCGGGGCACTGG | 11637 | CCAGTGCCCCGGAGCCACC |
| 8959 | GTGGCTCCGGGGCACTGGG | 11638 | CCCAGTGCCCCGGAGCCAC |
| 8960 | TGGCTCCGGGGCACTGGGT | 11639 | ACCCAGTGCCCCGGAGCCA |
| 8961 | GGCTCCGGGGCACTGGGTG | 11640 | CACCCAGTGCCCCGGAGCC |
| 8962 | GCTCCGGGGCACTGGGTGA | 11641 | TCACCCAGTGCCCCGGAGC |
| 8963 | CTCCGGGGCACTGGGTGAC | 11642 | GTCACCCAGTGCCCCGGAG |
| 8964 | TCCGGGGCACTGGGTGACC | 11643 | GGTCACCCAGTGCCCCGGA |
| 8965 | CCGGGGCACTGGGTGACCT | 11644 | AGGTCACCCAGTGCCCCGG |
| 8966 | CGGGGCACTGGGTGACCTG | 11645 | CAGGTCACCCAGTGCCCCG |
| 8967 | GGGGCACTGGGTGACCTGC | 11646 | GCAGCTCACCCAGTGCCCC |
| 8968 | GGGCACTGGGTGACCTGCA | 11647 | TGCAGGTCACCCAGTGCCC |
| 8969 | GGCACTGGGTGACCTGCAC | 11648 | GTGCAGGTCACCCAGTGCC |
| 8970 | GCACTGGGTGACCTGCACC | 11649 | GGTGCAGGTCACCCAGTGC |
| 8971 | CACTGGGTGACCTGCACCT | 11650 | AGGTGCAGGTCACCCAGTG |
| 8972 | ACTGGGTGACCTGCACCTC | 11651 | GAGGTGCAGGTCACCCAGT |
| 8973 | CTGGGTGACCTGCACCTCA | 11652 | TGAGGTGCAGGTCACCCAG |
| 8974 | TGGGTGACCTGCACCTCAC | 11653 | GTGAGGTGCAGGTCACCCA |
| 8975 | GGGTGACCTGCACCTCACC | 11654 | GGTGAGGTGCAGGTCACCC |
| 8976 | GGTGACCTGCACCTCACCA | 11655 | TGGTGAGGTGCAGGTCACC |
| 8977 | GTGACCTGCACCTCACCAC | 11656 | GTGGTGAGGTGCAGGTCAC |
| 8978 | TGACCTGCACCTCACCACC | 11657 | GGTGGTGAGGTGCAGGTCA |
| 8979 | GACCTGCACCTCACCACCC | 11658 | GGGTGGTGAGGTGCAGGTC |
| 8980 | ACCTGCACCTCACCACCCT | 11659 | AGGGTGGTGAGGTGCAGGT |
| 8981 | CCTGCACCTCACCACCCTC | 11660 | GAGGGTGGTGAGGTGCAGG |
| 8982 | CTGCACCTCACCACCCTCT | 11661 | AGAGGGTGGTGAGGTGCAG |
| 8983 | TGCACCTCACCACCCTCTA | 11662 | TAGAGGGTGGTGAGGTGCA |
| 8984 | GCACCTCACCACCCTCTAC | 11663 | GTAGAGGGTGGTGAGGTGC |
| 8985 | CACCTCACCACCCTCTACT | 11664 | AGTAGAGGGTGGTGAGGTG |
| 8986 | ACCTCACCACCCTCTACTC | 11665 | GAGTAGAGGGTGGTGAGGT |
| 8987 | CCTCACCACCCTCTACTCT | 11666 | AGAGTAGAGGGTGGTGAGG |
| 8988 | CTCACCACCCTCTACTCTG | 11667 | CAGAGTAGAGGGTGGTGAG |
| 8989 | TCACCACCCTCTACTCTGC | 11668 | GCAGAGTAGAGGGTGGTGA |
| 8990 | CACCACCCTCTACTCTGCC | 11669 | GGGAGAGTAGAGGGTGGTG |
| 8991 | ACCACCCTCTACTCTGCCT | 11670 | AGGCAGAGTAGAGGGTGGT |
| 8992 | CCACCCTCTACTCTGCCTT | 11671 | AAGGCAGAGTAGAGGGTGG |
| 8993 | CACCCTCTACTCTGCCTTT | 11672 | AAAGGCAGAGTAGAGGGTG |
| 8994 | ACCCTCTACTCTGCCTTTA | 11673 | TAAAGGCAGAGTAGAGGGT |
| 8995 | CCCTCTACTCTGCCTTTAT | 11674 | ATAAAGGCAGAGTAGAGGG |
| 8996 | CCTCTACTCTGCCTTTATG | 11675 | CATAAAGGCAGAGTAGAGG |
| 8997 | CTCTACTCTGCCTTTATGG | 11676 | CCATAAAGGCAGAGTAGAG |
| 8998 | TCTACTCTGCCTTTATGGA | 11677 | TCCATAAAGGCAGAGTAGA |
| 8999 | CTACTCTGCCTTTATGGAG | 11678 | CTCCATAAAGGCAGAGTAG |
| 9000 | TACTCTGCCTTTATGGAGC | 11679 | GCTCCATAAAGGCAGAGTA |
| 9001 | ACTCTGCCTTTATGGAGCT | 11680 | AGCTCCATAAAGGCAGAGT |
| 9002 | CTCTGCCTTTATGGAGCTG | 11681 | CAGCTCCATAAAGGCAGAG |
| 9003 | TCTGCCTTTATGGAGCTGG | 11682 | CCAGCTCCATAAAGGCAGA |
| 9004 | CTGCCTTTATGGAGCTGGA | 11683 | TCCAGCTCCATAAAGGCAG |
| 9005 | TGCCTTTATGGAGCTGGAG | 11684 | CTCCAGCTCCATAAAGGCA |
| 9006 | GCCTTTATGGAGCTGGAGC | 11685 | GCTCCAGCTGCATAAAGGC |
| 9007 | CCTTTATGGAGCTGGAGCC | 11686 | GGCTCCAGCTCCATAAAGG |
| 9008 | CTTTATGGAGCTGGAGCCC | 11687 | GGGCTCCAGCTCCATAAAG |
| 9009 | TTTATGGAGCTGGAGCCCA | 11688 | TGGGCTCCAGCTCCATAAA |
| 9010 | TTATGGAGCTGGAGCCCAC | 11689 | GTGGGCTCCAGCTCCATAA |
| 9011 | TATGGAGCTGGAGCCCACG | 11690 | CGTGGGCTCCAGCTCCATA |
| 9012 | ATGGAGCTGGAGCCCACGC | 11691 | GCGTGGGCTCCAGCTCCAT |
| 9013 | TGGAGCTGGAGCCCACGCC | 11692 | GGCGTGGGCTCCAGCTCCA |
| 9014 | GGAGCTGGAGCCCACGCCC | 11693 | GGCCGTGGGCTCCAGCTCC |
| 9015 | GAGCTGGAGCCCACGCCCC | 11694 | GGGGCGTGGGCTCCAGCTC |
| 9016 | AGCTGGAGCCCACGCCCCC | 11695 | GGGGGCGTGGGCTCCAGCT |
| 9017 | GCTGGAGCCCACGCCCCCC | 11696 | GGGGGGCGTGGGCTCCAGC |
| 9018 | CTGGAGCCCACGCCCCCCA | 11697 | TGGGGGGCGTGGGCTCCAG |
| 9619 | TGGAGCCCACGCCCCCCAC | 11698 | GTGGGGGGCGTGGGCTCCA |
| 9020 | GGAGCCCAGGCCCCCCACG | 11699 | CGTGGGGGGCGTGGGCTCC |
| 9021 | GAGCCCACGCCCCCCACGG | 11700 | CCGTGGGGGGCGTGGGCTC |
| 9022 | AGCCCACGCCCCCCACGGC | 11701 | GCCGTGGGGGGCGTGGGCT |
| 9023 | GCCCACGCCCCCCACGGCC | 11702 | GGCCGTGGGGGGCGTGGGC |
| 9024 | CCCACGCCCCCCACGGCCC | 11703 | GGGCCGTGGGGGGCGTGGG |
| 9025 | CCACGCCCCCCACGGCCCC | 11704 | GGGGCCGTGGGGGGCGTGG |
| 9026 | CACGCCCCCCACGGCCCCT | 11705 | AGGGGCCGTGGGGGGCGTG |
| 9027 | ACGCCCCCCACGGCCCCTG | 11706 | CAGGGGCCGTGGGGGGCGT |
| 9028 | CGCCCCCCACGGCCCCTGC | 11707 | GCAGGGGCCGTGGGGGGCG |
| 9029 | GCCGCCCACGGCCCCTGCA | 11708 | TGCAGGGGCCGTGGGGGGC |
| 9030 | CCCCCCACGGCCCCTGCAG | 11709 | CTGCAGGGGCCGTGGGGGG |
| 9031 | CCCCCACGGCCCCTGCAGG | 11710 | CCTGCAGGGGCCGTGGGGG |
| 9032 | CCCCACGGCCCCTGCAGGC | 11711 | GCCTGCAGGGGCCGTGGGG |
| 9033 | CCCACGGCCCCTGCAGGCC | 11712 | GGCCTGCAGGGGCCGTGGG |
| 9034 | CCACGGCCCCTGCAGGCCC | 11713 | GGGCCTGCAGGGGCCGTGG |
| 9035 | CACGGCCCCTGCAGGCCCC | 11714 | GGGGCCTGCAGGGGCCGTG |
| 9036 | ACGGCCCCTGCAGGCCCCT | 11715 | AGGGGCCTGCAGGGGCCGT |
| 9037 | CGGCCCCTGCAGGCCCCTC | 11716 | GAGGGGCCTGCAGGGGCCG |
| 9038 | GGCCCCTGCAGGCCCCTCT | 11717 | AGAGGGGCGTGCAGGGGCC |
| 9039 | GCCCCTGCAGGCCCCTCTG | 11718 | CAGAGGGGCCTGCAGGGGC |
| 9040 | CCCCTGCAGGCCCCTCTGT | 11719 | ACAGAGGGGCCTGCAGGGG |
| 9041 | CCCTGCAGGCCCCTCTGTG | 11720 | CACAGAGGGGCCTGCAGGG |
| 9042 | CCTGCAGGCCCCTCTGTGT | 11721 | ACACAGAGGGGCCTGCAGG |
| 9043 | CTGCAGGCCCCTCTGTGTA | 11722 | TACACAGAGGGGCCTGCAG |
| 9044 | TGCAGGCCCCTCTGTGTAC | 11723 | GTACACAGAGGGGCCTGCA |
| 9045 | GCAGGCCCCTCTGTGTACC | 11724 | GGTACACAGAGGGGCCTGC |
| 9046 | CAGGCCCCTCTGTGTACCT | 11725 | AGGTACACAGAGGGGCCTG |
| 9047 | AGGCCCCTCTGTGTACCTC | 11726 | GAGGTACACAGAGGGGCCT |
| 9048 | GGCCCCTCTGTGTACCTCA | 11727 | TGAGGTACACAGAGGGGCC |
| 9049 | GCCCCTCTGTGTACCTCAG | 11728 | CTGAGGTACACAGAGGGGC |
| 9050 | CCCCTCTGTGTACCTCAGC | 11729 | GCTGAGGTACAGAGAGGGG |
| 9051 | CCCTCTGTGTACCTCAGCC | 11730 | GGCTGAGGTACACAGAGGG |
| 9052 | CCTCTGTGTACCTCAGCCC | 11731 | GGGCTGAGGTACACAGAGG |
| 9053 | CTCTGTGTACCTCAGCCCC | 11732 | GGGGCTGAGGTACACAGAG |
| 9054 | TCTGTGTACCTCAGCCCCA | 11733 | TGGGGCTGAGGTACACAGA |
| 9055 | CTGTGTACCTCAGCCCCAG | 11734 | CTGGGGCTGAGGTACAGAG |
| 9056 | TGTGTACCTCAGCCCCAGC | 11735 | GCTGGGGCTGAGGTACACA |
| 9057 | GTGTACCTCAGCCCCAGCT | 11736 | AGCTGGGGCTGAGGTACAC |
| 9058 | TGTACCTCAGCCCCAGCTC | 11737 | GAGCTGGGGCTGAGGTACA |
| 9059 | GTACCTCAGCCCCAGCTCC | 11738 | GGAGCTGGGGCTGAGGTAC |
| 9060 | TACCTCAGCCCCAGCTCCA | 11739 | TGGAGCTGGGGCTGAGGTA |
| 9061 | ACCTCAGCCCCAGCTCCAA | 11740 | TTGGAGCTGGGGCTGAGGT |
| 9062 | CCTCAGCCCCAGCTCCAAG | 11741 | CTTGGAGCTGGGGCTGAGG |
| 9063 | CTCAGCCCCAGCTCCAAGC | 11742 | GCTTGGAGCTGGGGCTGAG |
| 9664 | TCAGCCCCAGCTCCAAGCC | 11743 | GGCTTGGAGCTGGGGCTGA |
| 9065 | CAGCCCCAGCTCCAAGCCC | 11744 | GGGCTTGGAGCTGGGGCTG |
| 9066 | AGCCCCAGCTCCAAGCCCG | 11745 | CGGGCTTGGAGCTGGGGCT |
| 9067 | GCCCCAGCTCCAAGCCCGT | 11746 | ACGGGCTTGGAGCTGGGGC |
| 9068 | CCCCAGCTCCAAGCCCGTG | 11747 | CACGGGCTTGGAGCTGGGG |
| 9069 | CCCAGCTCCAAGCCCGTGG | 11748 | CCACGGGCTTGGAGCTGGG |
| 9070 | CCAGCTCCAAGCCCGTGGC | 11749 | GGCACGGGCTTGGAGCTGG |
| 9071 | CAGCTCCAAGCCCGTGGCC | 11750 | GGCCACGGGCTTGGAGCTG |
| 9072 | AGCTCCAAGCCCGTGGCCC | 11751 | GGGCCACGGGCTTGGAGCT |
| 9073 | GCTCCAAGCCCGTGGCCCT | 11752 | AGGGCCACGGGCTTGGACC |
| 9074 | CTCCAAGCCCGTGGCCCTG | 11753 | CAGGGCCACGGGCTTGGAG |
| 9075 | TCCAAGCCCGTGGCCCTGG | 11754 | CCAGGGCCACGGGCTTGGA |
| 9076 | CCAAGCCCGTGGCCCTGGC | 11755 | GCCAGGGCCACGGGCTTGG |
| 9077 | CAAGCCCGTGGCCCTGGCA | 11756 | TGCCAGGGCCACGGGCTTG |
| 9078 | AAGCCCGTGGCCCTGGCAT | 11757 | ATGCCAGGGCCACGGGCTT |
| 9079 | AGCCCGTGGCCCTGGCATG | 11758 | CATGCCAGGGCCACGGGCT |
| 9080 | GCCCGTGGCCCTGGCATGA | 11759 | TCATGCCAGGGCCACGGGG |
| 9081 | CCCGTGGCCCTGGCATGAG | 11760 | CTCATGCCAGGGCCACGGG |
| 9082 | CCGTGGCCCTGGCATGAGC | 11761 | GCTCATGCCAGGGCCACGG |
| 9083 | CGTGGCCCTGGCATGAGCT | 11762 | AGCTCATGGCAGGGCCACG |
| 9084 | GTGGCCCTGGCATGAGCTG | 11763 | CAGCTCATGCCAGGGCCAC |
| 9085 | TGGCCCTGGCATGAGCTGT | 11764 | ACAGCTCATGCCAGGGCCA |
| 9086 | GCCCCTGGCATGAGCTGTG | 11765 | CACAGCTCATGCCAGGGCC |
| 9087 | GCCCTGGCATGAGCTGTGC | 11766 | GCACAGCTCATGCCAGGGC |
| 9088 | CCCTGGCATGAGCTGTGCC | 11767 | GGCACAGCTCATGCCAGGG |
| 9089 | CCTGGCATGAGCTGTGCCC | 11768 | GGGCACAGCTCATGCCAGG |
| 9090 | CTGGCATGAGCTGTGCCCA | 11769 | TGGGCACAGCTCATGCCAG |
| 9091 | TGGCATGAGCTGTGCCCAG | 11770 | CTGGGCACAGCTCATGCCA |
| 9092 | GGCATGAGCTGTGCCCAGC | 11771 | GCTGGGCACAGCTCATGCC |
| 9093 | GCATGAGCTGTGCCCAGCT | 11772 | AGGTGGGCACAGCTCATGC |
| 9094 | CATGAGCTGTGCCCAGCTT | 11773 | AAGCTGGGCACAGCTCATG |
| 9095 | ATGAGCTGTGCCCAGCTTC | 11774 | GAAGCTGGGCACAGCTCAT |
| 9096 | TGAGCTGTGCCCAGCTTCG | 11775 | CGAAGGTGGGCACAGCTCA |
| 9097 | GAGCTGTGCCCAGCTTCGT | 11776 | ACGAAGCTGGGCACAGCTC |
| 9098 | AGCTGTGCCCAGCTTCGTC | 11777 | GACGAAGCTGGGCACAGCT |
| 9099 | GCTGTGCCCAGCTTCGTCA | 11778 | TGACGAAGCTGGGCACAGC |
| 9100 | CTGTGCCCAGCTTCGTCAG | 11779 | CTGACGAAGCTGGGCACAG |
| 9101 | TGTGCCCAGCTTCGTCAGC | 11780 | GCTGACGAAGCTGGGCACA |
| 9102 | GTGCCCAGCTTCGTCAGCT | 11781 | AGCTGACGAAGCTGGGCAC |
| 9103 | TGCCCAGCTTCGTCAGCTC | 11782 | GAGCTGACGAAGCTGGGCA |
| 9104 | GCCCAGCTTCGTCAGCTCC | 11783 | GGAGCTGACGAAGCTGGGC |
| 9105 | CCCAGCTTCGTCAGCTCCA | 11784 | TGGAGCTGACGAAGCTGGG |
| 9106 | CCAGCTTCGTCAGCTCCAG | 11785 | CTGGAGCTGACGAAGCTGG |
| 9107 | CAGCTTCGTCAGCTCCAGC | 11786 | GCTGGAGCTGACGAAGCTG |
| 9108 | AGCTTCGTCAGCTCCAGCG | 11787 | CGCTGGAGCTGACGAAGCT |
| 9109 | GCTTCGTCAGCTCCAGCGT | 11788 | ACGCTGGAGCTGACGAAGC |
| 9110 | CTTCGTCAGCTCCAGCGTT | 11789 | AACGCTGGAGCTGACGAAG |
| 9111 | TTCGTCAGCTCCAGCGTTT | 11790 | AAACGCTGGAGCTGACGAA |
| 9112 | TCGTCAGCTCCAGCGTTTG | 11791 | CAAACGCTGGAGCTGACGA |
| 9113 | CGTCAGCTCCAGCGTTTGC | 11792 | GCAAACGCTGGAGCTGACG |
| 9114 | GTCAGCTCCAGCGTTTGCC | 11793 | GGCAAACGCTGGAGCTGAC |
| 9115 | TCAGCTCCAGCGTTTGCCT | 11794 | AGGCAAACGCTGGAGCTGA |
| 9116 | CAGCTCCAGCGTTTGCCTG | 11795 | CAGGCAAACGCTGGAGCTG |
| 9117 | AGCTCCAGCGTTTGCCTGG | 11796 | CCAGGCAAACGCTGGAGCT |
| 9118 | GCTCCAGCGTTTGCCTGGT | 11797 | ACCAGGCAAACGCTGGAGC |
| 9119 | CTCCAGCGTTTGCCTGGTC | 11798 | GACCAGGCAAACGCTGGAG |
| 9120 | TCCAGCGTTTGCCTGGTCT | 11799 | AGACCAGGCAAACGCTGGA |
| 9121 | CCAGCGTTTGCCTGGTCTG | 11800 | CAGACCAGGCAAACGCTGG |
| 9122 | CAGCGTTTGCCTGGTCTGG | 11801 | CCAGACCAGGCAAACGCTG |
| 9123 | AGCGTTTGCCTGGTCTGGA | 11802 | TCCAGACCAGGCAAACGCT |
| 9124 | GCGTTTGCCTGGTCTGGAA | 11803 | TTCCAGACCAGGCAAACGC |
| 9125 | CGTTTGCCTGGTCTGGAAG | 11804 | CTTCCAGACCAGGCAAACG |
| 9126 | GTTTGCCTGGTCTGGAAGT | 11805 | ACTTCCAGACCAGGCAAAC |
| 9127 | TTTGCCTGGTCTGGAAGTC | 11806 | GACTTCCAGACCAGGCAAA |
| 9128 | TTGCCTGGTCTGGAAGTCC | 11807 | GGACTTCCAGACCAGGCAA |
| 9129 | TGCCTGGTCTGGAAGTCCT | 11808 | AGGACTTCCAGACCAGGCA |
| 9130 | GCCTGGTCTGGAAGTCCTG | 11809 | CAGGACTTCCAGACCAGGC |
| 9131 | CCTGGTCTGGAAGTCCTGG | 11810 | CCAGGACTTCCAGACCAGG |
| 9132 | CTGGTCTGGAAGTCCTGGC | 11811 | GCCAGGACTTCCAGACCAG |
| 9133 | TGGTCTGGAAGTCCTGGCC | 11812 | GGCCAGGACTTCCAGACCA |
| 9134 | GGTCTGGAAGTCCTGGCCG | 11813 | CGGCCAGGACTTCCAGACC |
| 9135 | GTCTGGAAGTCCTGGCCGG | 11814 | CCGGCCAGGACTTCCAGAC |
| 9136 | TCTGGAAGTCCTGGCCGGC | 11815 | GCCGGCCAGGACTTCCAGA |
| 9137 | CTGGAAGTCCTGGCCGGCC | 11816 | GGCCGGCCAGGACTTCCAG |
| 9138 | TGGAAGTCCTGGCCGGCCG | 11817 | CGGCCGGCCAGGACTTCCA |
| 9139 | GGAAGTCCTGGCCGGCCGC | 11818 | GCGGCCGGCCAGGACTTCC |
| 9140 | GAAGTCCTGGCCGGCCGCC | 11819 | GGCGGCCGGCCAGGACTTC |
| 9141 | AAGTCCTGGCCGGCCGCCC | 11820 | GGGCGGCCGGCCAGGACTT |
| 9142 | AGTCCTGGCCGGCCGCCCA | 11821 | TGGGCGGCCGGCCAGGACT |
| 9143 | GTCCTGGCCGGCCGCCCAC | 11822 | GTGGGCGGCCGGCCAGGAC |
| 9144 | TCCTGGCCGGCCGCCCACA | 11823 | TGTGGGCGGCCGGCCAGGA |
| 9145 | CCTGGCCGGCCGCCCACAT | 11824 | ATGTGGGCGGCCGGCCAGG |
| 9146 | CTGGCCGGCCGCCCACATC | 11825 | GATGTGGGCGGCCGGCCAG |
| 9147 | TGGCCGGCCGCCCACATCG | 11826 | CGATGTGGGCGGCCGGCCA |
| 9148 | GGCCGGCCGCCCACATCGG | 11827 | CCGATGTGGGCGGCCGGCC |
| 9149 | GCCGGCCGCCCACATCGGG | 11828 | CCCGATGTGGGCGGCCGGC |
| 9150 | CCGGCCGCCCACATCGGGC | 11829 | GCCCGATGTGGGCGGCCGG |
| 9151 | CGGCCGCCCACATCGGGCT | 11830 | AGCCCGATGTGGGCGGCCG |
| 9152 | GGCCGCCCACATCGGGCTC | 11831 | GAGCCCGATGTGGGCGGCC |
| 9153 | GCCGCCCACATCGGGCTCA | 11832 | TGAGCCCGATGTGGGCGGC |
| 9154 | CCGCCCACATCGGGCTCAC | 11833 | GTGAGCCCGATGTGGGCGG |
| 9155 | CGCCCACATCGGGCTCACC | 11834 | GGTGAGCCCGATGTGGGCG |
| 9156 | GCCCACATCGGGCTCACCT | 11835 | AGGTGAGCCCGATGTGGGC |
| 9157 | CCCACATCGGGCTCACCTT | 11836 | AAGGTGAGCCCGATGTGGG |
| 9158 | CCACATCGGGCTCACCTTA | 11837 | TAAGGTGAGCCCGATGTGG |
| 9159 | CACATCGGGCTCACCTTAA | 11838 | TTAAGGTGAGCCCGATGTG |
| 9160 | ACATCGGGCTCACCTTAAA | 11839 | TTTAAGGTGAGCCCGATGT |
| 9161 | CATCGGGCTCACCTTAAAG | 11840 | CTTTAAGGTGAGCCCGATG |
| 9162 | ATCGGGCTCACCTTAAAGG | 11841 | CCTTTAAGGTGAGCCCGAT |
| 9163 | TCGGGCTCACCTTAAAGGT | 11842 | ACCTTTAAGCTGAGCCCGA |
| 9164 | CGGGCTCACCTTAAAGGTC | 11843 | GACCTTTAAGGTGAGCCCG |
| 9165 | GGGCTCACCTTAAAGGTCA | 11844 | TGACCTTTAAGGTGAGCCC |
| 9166 | GGCTCACCTTAAAGGTCAA | 11845 | TTGACCTTTAAGGTGAGCC |
| 9167 | GCTCACCTTAAAGGTCAAG | 11846 | CTTGACCTTTAAGGTGAGC |
| 9168 | CTCACCTTAAAGGTCAAGG | 11847 | CCTTGACCTTTAAGGTGAG |
| 9169 | TCACCTTAAAGGTCAAGGA | 11848 | TCCTTGACCTTTAAGGTGA |
| 9170 | CACCTTAAAGGTCAAGGAA | 11849 | TTCCTTGACCTTTAAGGTG |
| 9171 | ACCTTAAAGGTCAAGGAAG | 11850 | CTTCCTTGACCTTTAAGGT |
| 9172 | CCTTAAAGGTCAAGGAAGG | 11851 | CCTTCCTTGACCTTTAAGG |
| 9173 | CTTAAAGGTCAAGGAAGGA | 11852 | TCCTTCCTTGACCTTTAAG |
| 9174 | TTAAAGGTCAAGGAAGGAA | 11853 | TTCCTTCCTTGACCTTTAA |
| 9175 | TAAAGGTCAAGGAAGGAAA | 11854 | TTTCCTTCCTTGACCTTTA |
| 9176 | AAAGGTCAAGGAAGGAAAA | 11855 | TTTTCCTTCCTTGACCTTT |
| 9177 | AAGGTCAAGGAAGGAAAAT | 11856 | ATTTTCCTTCCTTGACCTT |
| 9178 | AGGTGAAGGAAGGAAAATA | 11857 | TATTTTCCTTCCTTGACCT |
| 9179 | GGTCAAGGAAGGAAAATAC | 11858 | GTATTTTCCTTCCTTGACC |
| 9180 | GTCAAGGAAGGAAAATACT | 11859 | AGTATTTTCCTTCCTTGAC |
| 9181 | TCAAGGAAGGAAAATACTA | 11860 | TAGTATTTTCCTTCCTTGA |
| 9182 | CAAGGAAGGAAAATACTAC | 11861 | GTAGTATTTTCCTTCCTTG |
| 9183 | AAGGAAGGAAAATACTACC | 11862 | GGTAGTATTTTCCTTCCTT |
| 9184 | AGGAAGGAAAATACTACCT | 11863 | AGGTAGTATTTTCCTTCCT |
| 9185 | GGAAGGAAAATACTACCTG | 11864 | CAGGTAGTATTTTCCTTCC |
| 9186 | GAAGGAAAATACTACCTGT | 11865 | ACAGGTAGTATTTTCCTTC |
| 9187 | AAGGAAAATACTACCTGTC | 11866 | GACAGGTAGTATTTTCCTT |
| 9188 | AGGAAAATACTACCTGTCC | 11867 | GGACAGGTAGTATTTTCCT |
| 9189 | GGAAAATACTACCTGTCCC | 11868 | GGGACAGGTAGTATTTTCC |
| 9190 | GAAAATACTACCTGTCCCC | 11869 | GGGGACAGGTAGTATTTTC |
| 9191 | AAAATACTACCTGTCCCCT | 11870 | AGGGGACAGGTAGTATTTT |
| 9192 | AAATACTACCTGTCCCCTA | 11871 | TAGGGGACAGGTAGTATTT |
| 9193 | AATACTACCTGTCCCCTAT | 11872 | ATAGGGGACAGGTAGTATT |
| 9194 | ATACTACCTGTCCCCTATG | 11873 | CATAGGGGACAGGTAGTAT |
| 9195 | TACTACCTGTCCCCTATGC | 11874 | GCATAGGGGACAGGTAGTA |
| 9196 | ACTACCTGTCCCCTATGCC | 11875 | GGCATAGGGGACAGGTAGT |
| 9197 | CTACCTGTCCCCTATGCCA | 11876 | TGGCATAGGGGACAGGTAG |
| 9198 | TACCTGTCCCCTATGCCAC | 11877 | GTGGCATAGGGGACAGGTA |
| 9199 | ACCTGTCCCCTATGCCACT | 11878 | AGTGGCATAGGGGACAGGT |
| 9200 | CCTGTCCCCTATGCCACTA | 11879 | TAGTGGCATAGGGGACAGG |
| 9201 | CTGTCCCCTATGCCACTAA | 11880 | TTAGTGGCATAGGGGACAG |
| 9202 | TGTCCCCTATGCCACTAAG | 11881 | CTTAGTGGCATAGGGGACA |
| 9203 | GTCCCCTATGCCACTAAGC | 11882 | GCTTAGTGGCATAGGGGAC |
| 9204 | TCCCCTATGCCACTAAGCC | 11883 | GGCTTAGTGGCATAGGGGA |
| 9205 | CCCCTATGCCACTAAGCCA | 11884 | TGGCTTAGTGGCATAGGGG |
| 9206 | CCCTATGCCACTAAGCCAA | 11885 | TTGGCTTAGTGGCATAGGG |
| 9207 | CCTATGCCACTAAGCCAAC | 11886 | GTTGGCTTAGTGGCATAGG |
| 9208 | CTATGCCACTAAGCCAACG | 11887 | CGTTGGCTTAGTGCCATAG |
| 9209 | TATGCCACTAAGCCAACGT | 11888 | ACGTTGGCTTAGTGGCATA |
| 9210 | ATGCCACTAAGCCAACGTG | 11889 | CACGTTGGCTTAGTGGCAT |
| 9211 | TGCCACTAAGCCAACGTGT | 11890 | ACACGTTGGCTTAGTGGCA |
| 9212 | GCCACTAAGCCAACGTGTG | 11891 | CACACGTTGGCTTAGTGGC |
| 9213 | CCACTAAGCCAACGTGTGT | 11892 | ACACACGTTGGCTTAGTGG |
| 9214 | CACTAAGCCAACGTGTGTG | 11893 | CACACACGTTGGCTTAGTG |
| 9215 | ACTAAGCCAACGTGTGTGT | 11894 | ACACACACGTTGGCTTAGT |
| 9216 | CTAAGCCAACGTGTGTGTC | 11895 | GACACACACGTTGGCTTAG |
| 9217 | TAAGCCAACGTGTGTGTCA | 11896 | TGACACACACGTTGGCTTA |
| 9218 | AAGCCAACGTGTGTGTCAG | 11897 | CTGACACACACGTTGGCTT |
| 9219 | ACCCAACGTGTGTGTCAGC | 11898 | GCTGACACACACGTTGGCT |
| 9220 | GCCAACGTGTGTGTCAGCT | 11899 | AGCTGACACACACGTTGGC |
| 9221 | CCAACGTGTGTGTCAGCTG | 11900 | CAGCTGACACACACGTTGG |
| 9222 | CAACGTGTGTGTCAGCTGG | 11901 | CCAGCTGACACACAGGTTG |
| 9223 | AACGTGTGTGTCAGCTGGT | 11902 | ACCAGCTGACACACACGTT |
| 9224 | ACGTGTGTGTCAGCTGGTA | 11903 | TACCAGCTGACACACAGGT |
| 9225 | CGTGTGTGTCAGCTGGTAG | 11904 | CTACCAGCTGACACACACG |
| 9226 | GTGTGTGTCAGCTGGTAGC | 11905 | GCTACCAGGTGACACACAC |
| 9227 | TGTGTGTCAGCTGGTAGCT | 11906 | AGCTACCAGCTGACACACA |
| 9228 | GTGTGTCAGCTGGTAGCTG | 11907 | CAGCTACCAGCTGACACAC |
| 9229 | TGTGTCAGCTGGTAGCTGG | 11908 | CCAGCTACCAGCTGACACA |
| 9230 | GTGTCAGCTGGTAGCTGGG | 11909 | CCCAGCTACGAGCTGACAC |
| 9231 | TGTCAGCTGGTAGCTGGGG | 11910 | CCCCAGCTACCAGCTGACA |
| 9232 | GTCAGCTGGTAGCTGGGGG | 11911 | CCCCCAGCTACCAGCTGAC |
| 9233 | TCAGCTGGTAGCTGGGGGC | 11912 | GCCCCCAGCTACCAGCTGA |
| 9234 | CAGCTGGTAGCTGGGGGCG | 11913 | CGCCCCCAGCTACCAGCTG |
| 9235 | AGCTGGTAGCTGGGGGCGG | 11914 | GCGCCCCCAGCTACCAGCT |
| 9236 | GCTGGTAGGTGGGGGCGCA | 11915 | TGCGCCCCCAGCTACCAGC |
| 9237 | CTGGTAGCTGGGGGCGCAG | 11916 | CTGCGCCCCCAGCTACCAG |
| 9238 | TGGTAGCTGGGGGCGCAGA | 11917 | TCTGCGCCCCCAGCTACCA |
| 9239 | GGTAGCTGGGGGCGCAGAG | 11918 | CTCTGCGCCCCCAGCTACC |
| 9240 | GTAGCTGGGGGCGCAGAGG | 11919 | CCTCTGCGCCCCCAGCTAC |
| 9241 | TAGCTGGGGGCGCAGAGGA | 11920 | TCCTCTGCGCCCCCAGCTA |
| 9242 | AGCTGGGGGCGCAGAGGAC | 11921 | GTCCTCTGCGCCCCCAGCT |
| 9243 | GCTGGGGGCGCAGAGGACA | 11922 | TGTCCTCTGCGCCCCCAGC |
| 9244 | CTGGGGGCGCAGAGGACAT | 11923 | ATGTCCTCTGCGCCCCCAG |
| 9245 | TGGGGGCGCAGAGGACATC | 11924 | GATGTCCTCTGCGCCCCCA |
| 9246 | GGGGGCGCAGAGGACATCA | 11925 | TGATGTCCTCTGCGCCCCC |
| 9247 | GGGGCGCAGAGGACATCAC | 11926 | GTGATGTCCTCTGCGCCCC |
| 9248 | GGGCGCAGAGGACATCACC | 11927 | GGTGATGTCCTCTGCGCCC |
| 9249 | GGCGCAGAGGACATCACCT | 11928 | AGGTGATGTCCTCTGCGCC |
| 9250 | GCGCAGAGGACATCACCTG | 11929 | CAGGTGATGTCCTCTGCGC |
| 9251 | CGCAGAGGACATCACCTGG | 11930 | CCAGGTGATGTCCTCTGCG |
| 9252 | GCAGAGGACATCACCTGGG | 11931 | CCCAGGTGATGTCCTCTGC |
| 9253 | CAGAGGACATCACCTGGGG | 11932 | CCCCAGGTGATGTCCTCTG |
| 9254 | AGAGGACATCACCTGGGGT | 11933 | ACCCCAGGTGATGTCCTCT |
| 9255 | GAGGACATCACCTGGGGTG | 11934 | CACCCCAGGTGATGTCCTC |
| 9256 | AGGACATCACCTGGGGTGC | 11935 | GCACCCCAGGTGATGTCCT |
| 9257 | GGACATCACCTGGGGTGCT | 11936 | AGCACCCCAGGTGATGTCC |
| 9258 | GACATCACCTGGGGTGCTG | 11937 | CAGCACCCCAGGTGATGTC |
| 9259 | ACATCACCTGGGGTGCTGC | 11938 | GCAGCACCCCAGGTGATGT |
| 9260 | CATCACCTGGGGTGCTGCC | 11939 | GGCAGCACCCCAGGTGATG |
| 9261 | ATCACCTGGGGTGCTGCCT | 11940 | AGGCAGCACCCCAGGTGAT |
| 9262 | TCACCTGGGGTGCTGCCTC | 11941 | GAGGGAGCACCCCAGGTGA |
| 9263 | CACCTGGGGTGGTGCCTCT | 11942 | AGAGGCAGCACCCCAGGTG |
| 9264 | ACCTGGGGTGCTGCCTCTC | 11943 | GAGAGGCAGCACCCCAGGT |
| 9265 | CCTGGGGTGCTGCCTCTCA | 11944 | TGAGAGGCAGCACCCCAGG |
| 9266 | CTGGGGTGCTGCCTCTCAC | 11945 | GTGAGAGGCAGCACCCCAG |
| 9267 | TGGGGTGCTGCCTCTCACA | 11946 | TGTGAGAGGCAGCACCCCA |
| 9268 | GGGGTGCTGCCTCTCACAC | 11947 | GTGTGAGAGGCAGCACCCC |
| 9269 | GGGTGCTGCCTCTCACACA | 11948 | TGTGTGAGAGGCAGGACCC |
| 9270 | GGTGCTGCCTCTCACACAT | 11949 | ATGTGTGAGAGGCAGCACC |
| 9271 | GTGCTGCCTCTCACACATT | 11950 | AATGTGTGAGAGGCAGCAC |
| 9272 | TGCTGCCTCTCACACATTT | 11951 | AAATGTGTGAGAGGCAGCA |
| 9273 | GCTGCCTCTCACACATTTC | 11952 | GAAATGTGTGAGAGGCAGC |
| 9274 | CTGCCTCTCACACATTTCT | 11953 | AGAAATGTGTGAGAGGCAG |
| 9275 | TGCCTCTCACACATTTCTG | 11954 | CAGAAATGTGTGAGAGGCA |
| 9276 | GCCTCTCACACATTTCTGC | 11955 | GCAGAAATGTGTGAGAGGC |
| 9277 | CCTCTCACACATTTCTGCC | 11956 | GGCAGAAATGTGTGAGAGG |
| 9278 | CTCTCACACATTTCTGCCA | 11957 | TGGCAGAAATGTGTGAGAG |
| 9279 | TCTCACACATTTCTGCCAC | 11958 | GTGGCAGAAATGTGTGAGA |
| 9280 | CTCACACATTTCTGCCACG | 11959 | CGTGGCAGAAATGTGTGAG |
| 9281 | TCACACATTTCTGCCACGT | 11960 | ACGTGGCAGAAATGTGTGA |
| 9282 | CACACATTTCTGCCACGTG | 11961 | CACGTGGCAGAAATGTGTG |
| 9283 | ACACATTTCTGCCACGTGG | 11962 | CCACGTGGCAGAAATGTGT |
| 9284 | CACATTTCTGCCACGTGGT | 11963 | ACCACGTGGCAGAAATGTG |
| 9285 | ACATTTCTGCCACGTGGTG | 11964 | CACCACGTGGCAGAAATGT |
| 9286 | CATTTCTGCCACGTGGTGG | 11965 | CCACCACGTGGCAGAAATG |
| 9287 | ATTTCTGCCACGTGGTGGC | 11966 | GCCACCACGTGGCAGAAAT |
| 9288 | TTTCTGCCACGTGGTGGCC | 11967 | GGCCACCACGTGGCAGAAA |
| 9289 | TTCTGCCACGTGGTGGCCC | 11968 | GCGCCACCACGTGGCAGAA |
| 9290 | TCTGCCACGTGGTGGCCCA | 11969 | TGGGCCACCACGTGGCAGA |
| 9291 | CTGCCACGTGGTGGCCCAG | 11970 | CTGGGCCACCACGTGGCAG |
| 9292 | TGCCACGTGGTGGCCCAGC | 11971 | GCTGGGCCACCACGTGGCA |
| 9293 | GCCACGTGGTGGCCCAGCT | 11972 | AGCTGGGCCACCACGTGGC |
| 9294 | CCACGTGGTGGCCCAGCTC | 11973 | GAGCTGGGCCACCACGTGG |
| 9295 | CACGTGGTGGCCCAGCTCC | 11974 | GGAGCTGGGCCACCACGTG |
| 9296 | ACGTGGTGGCCCAGCTCCT | 11975 | AGGAGCTGGGCCACCACGT |
| 9297 | CGTGGTGGCCCAGCTCCTC | 11976 | GAGGAGCTGGGCCACCACG |
| 9298 | GTGGTGGCCCAGCTCCTCA | 11977 | TGAGGAGCTGGGCCACCAC |
| 9299 | TGGTGGCCCAGCTCCTCAC | 11978 | GTGAGGAGCTGGGCCACCA |
| 9300 | GGTGGCCCAGCTCCTCACC | 11979 | GGTGAGGAGCTGGGCCACC |
| 9301 | GTGGCCCAGCTCCTCACCC | 11980 | GGGTGAGGAGCTGGGCCAC |
| 9302 | TGGCCCAGCTCCTCACCCA | 11981 | TGGGTGAGGAGCTGGGCCA |
| 9303 | GGCCCAGCTCCTCACCCAG | 11982 | CTGGGTGAGGAGCTGGGCC |
| 9304 | GCCCAGCTCCTCACCCAGG | 11983 | CCTGGGTGAGGAGCTGGGC |
| 9305 | CCCAGCTCCTCACCCAGGG | 11984 | CCCTGGGTGAGGAGCTGGG |
| 9306 | CCAGCTCCTCACCCAGGGC | 11985 | GCCCTGGGTGAGGAGCTGG |
| 9307 | CAGCTCCTCACCCAGGGCC | 11986 | GGCCCTGGGTGAGGAGCTG |
| 9308 | AGCTCCTCACCCAGGGCCC | 11987 | GGGGCCTGGGTGAGGAGCT |
| 9309 | GCTCCTCACCCAGGGCCCC | 11988 | GGGGCCCTGGGTGAGGAGC |
| 9310 | CTCCTCACCCAGGGCCCCC | 11989 | GGGGGCCCTGGGTGAGGAG |
| 9311 | TCCTCACCCAGGGCCCCCA | 11990 | TGGGGGCCCTGGGTGAGGA |
| 9312 | CCTCACCCAGGGCCCCCAA | 11991 | TTGGGGGCCCTGGGTGAGG |
| 9313 | CTCACCCAGGGCCCCGAAA | 11992 | TTTGGGGGCCCTGGGTGAG |
| 9314 | TCACCCAGGGCCCCCAAAG | 11993 | CTTTGGGGGCCCTGGGTGA |
| 9315 | CACCCAGGGCCCCCAAAGA | 11994 | TCTTTGGGGGCCCTGGGTG |
| 9316 | ACCCAGGGCCCCCAAAGAG | 11995 | CTCTTTGGGGGCCCTGGGT |
| 9317 | CCCAGGGCCCCCAAAGAGC | 11996 | GCTCTTTGGGGGCCCTGGG |
| 9318 | CCAGGGCCCCCAAAGAGCA | 11997 | TGCTCTTTGGGGGCCCTGG |
| 9319 | CAGGGCCCCCAAAGAGCAA | 11998 | TTGCTCTTTGGGGGCCCTG |
| 9320 | AGGGCCCCCAAAGAGCAAG | 11999 | CTTGCTCTTTGGGGGCCCT |
| 9321 | GGGCCCCCAAAGAGCAAGC | 12000 | GCTTGCTCTTTGGGGGCCC |
| 9322 | GGCCCCCAAAGAGCAAGCG | 12001 | CGCTTGCTCTTTGGGGGCC |
| 9323 | GCCCCCAAAGAGCAAGCGT | 12002 | ACGCTTGCTCTTTGGGGGC |
| 9324 | CCCCCAAAGAGCAAGCGTC | 12003 | GACGCTTGCTCTTTGGGGG |
| 9325 | CCCCAAAGAGCAAGCGTCT | 12004 | AGACGCTTGCTCTTTGGGG |
| 9326 | CCCAAAGAGCAAGCGTCTG | 12005 | CAGACGCTTGCTCTTTGGG |
| 9327 | CCAAAGAGCAAGCGTCTGG | 12006 | CCAGACGCTTGCTCTTTGG |
| 9328 | CAAAGAGCAAGCGTCTGGG | 12007 | CCCAGACGCTTGCTCTTTG |
| 9329 | AAAGAGCAAGCGTCTGGGC | 12008 | GCCCAGACGCTTGCTCTTT |
| 9330 | AAGAGCAAGCGTCTGGGCA | 12009 | TGCCCAGACGCTTGCTCTT |
| 9331 | AGAGCAAGCGTCTGGGCAA | 12010 | TTGCCCAGACGCTTGCTCT |
| 9332 | GAGCAAGCGTCTGGGCAAG | 12011 | CTTGCCCAGACGCTTGCTC |
| 9333 | AGCAAGCGTCTGGGCAAGA | 12012 | TCTTGCCCAGACGCTTGCT |
| 9334 | GCAAGCGTCTGGGCAAGAG | 12013 | CTCTTGCCCAGACGCTTGC |
| 9335 | CAAGCGTCTGGGCAAGAGG | 12014 | CCTCTTGCCCAGACGCTTG |
| 9336 | AAGCGTCTGGGCAAGAGGA | 12015 | TCCTCTTGCCCAGACGCTT |
| 9337 | AGCGTCTGGGCAAGAGGAA | 12016 | TTCCTCTTGCCCAGACGCT |
| 9338 | GCGTCTGGGCAAGAGGAAA | 12017 | TTTCCTCTTGCCCAGACGC |
| 9339 | CGTCTGGGCAAGAGGAAAA | 12018 | TTTTCCTCTTGCCCAGACG |
| 9340 | GTCTGGGCAAGAGGAAAAT | 12019 | ATTTTCCTCTTGCCCAGAC |
| 9341 | TCTGGGCAAGAGGAAAATG | 12020 | CATTTTCCTCTTGCCCAGA |
| 9342 | CTGGGCAAGAGGAAAATGC | 12021 | GCATTTTCCTCTTGCCCAG |
| 9343 | TGGGCAAGAGGAAAATGCC | 12022 | GGCATTTTCCTCTTGCCCA |
| 9344 | GGGCAAGAGGAAAATGCCC | 12023 | GGGCATTTTCCTCTTGCCC |
| 9345 | GGCAAGAGGAAAATGCCCT | 12024 | AGGGCATTTTCCTCTTGCC |
| 9346 | GCAAGAGGAAAATGCCCTG | 12025 | CAGGGCATTTTCCTCTTGC |
| 9347 | CAAGAGGAAAATGCCCTGT | 12026 | ACAGGGCATTTTCCTCTTG |
| 9348 | AAGAGGAAAATGCCCTGTC | 12027 | GACAGGGCATTTTCCTCTT |
| 9349 | AGAGGAAAATGCCCTGTCC | 12028 | GGACAGGGCATTTTCCTCT |
| 9350 | GAGGAAAATGCCCTGTCCC | 12029 | GGGACAGGGCATTTTCCTC |
| 9351 | AGGAAAATGCCCTGTCCCT | 12030 | AGGGACAGGGCATTTTCCT |
| 9352 | GGAAAATGCCCTGTCCCTA | 12031 | TAGGGACAGGGCATTTTCC |
| 9353 | GAAAATGCCCTGTCCCTAG | 12032 | CTAGGGACAGGGCATTTTC |
| 9354 | AAAATGCCCTGTCCCTAGC | 12033 | GCTAGGGACAGGGCATTTT |
| 9355 | AAATGCCCTGTCCCTAGCT | 12034 | AGCTAGGGACAGGGCATTT |
| 9356 | AATGCCCTGTCCCTAGCTC | 12035 | GAGCTAGGGACAGGGCATT |
| 9357 | ATGCCCTGTCCCTAGCTCA | 12036 | TGAGCTAGGGACAGGGCAT |
| 9358 | TGCCCTGTCCCTAGCTCAC | 12037 | GTGAGCTAGGGACAGGGCA |
| 9359 | GCCCTGTCCCTAGCTCACA | 12038 | TGTGAGCTAGGGACAGGGC |
| 9360 | CCCTGTCCCTAGCTCACAC | 12039 | GTGTGAGCTAGGGACAGGG |
| 9361 | CCTGTCCCTAGCTCACACT | 12040 | AGTGTGAGCTAGGGACAGG |
| 9362 | CTGTCCCTAGCTCACACTC | 12041 | GAGTGTGAGCTAGGGACAG |
| 9363 | TGTCCCTAGCTCACACTCA | 12042 | TGAGTGTGAGCTAGGGACA |
| 9364 | GTCCCTAGCTCACACTCAT | 12043 | ATGAGTGTGAGCTAGGGAC |
| 9365 | TCCCTAGCTCACACTCATC | 12044 | GATGAGTGTGAGCTAGGGA |
| 9366 | CCCTAGCTCACACTCATCC | 12045 | GGATGAGTGTGAGCTAGGG |
| 9367 | CCTAGCTCAGACTCATCCA | 12046 | TGGATGAGTGTGAGCTAGG |
| 9368 | CTAGCTCACACTCATCCAC | 12047 | GTGGATGAGTGTGAGCTAG |
| 9369 | TAGCTCACACTCATCCACA | 12048 | TGTGGATGAGTGTGAGCTA |
| 9370 | AGCTCACACTCATCCACAC | 12049 | GTGTGGATGAGTGTGAGCT |
| 9371 | GCTCACACTCATCCACACT | 12050 | AGTGTGGATGAGTGTGAGC |
| 9372 | CTCACACTCATCCACACTT | 12051 | AAGTGTGGATGAGTGTGAG |
| 9373 | TCACACTCATCCACACTTA | 12052 | TAAGTGTGGATGAGTGTGA |
| 9374 | CACACTCATCCACACTTAA | 12053 | TTAAGTGTGGATGAGTGTG |
| 9375 | ACACTCATCCACACTTAAG | 12054 | CTTAAGTGTGGATGAGTGT |
| 9376 | CACTCATCCACACTTAAGC | 12055 | GCTTAAGTGTGGATGAGTG |
| 9377 | ACTCATCCACACTTAAGCC | 12056 | GGCTTAAGTGTGGATGAGT |
| 9378 | CTCATCCACACTTAAGCCC | 12057 | GGGCTTAAGTGTGGATGAG |
| 9379 | TCATCCACACTTAAGCCCT | 12058 | AGGGCTTAAGTGTGGATGA |
| 9380 | CATCCACACTTAAGCCCTC | 12059 | GAGGGCTTAAGTGTGGATG |
| 9381 | ATCCACACTTAAGCCCTCG | 12060 | CGAGGGCTTAAGTGTGGAT |
| 9382 | TCCACACTTAAGCCCTCGT | 12061 | ACGAGGGCTTAAGTGTGGA |
| 9383 | CCACACTTAAGCCCTCGTG | 12062 | CACGAGGGCTTAAGTGTGG |
| 9384 | CACACTTAAGCCCTCGTGC | 12063 | GCACGAGGGCTTAAGTGTG |
| 9385 | ACACTTAAGCCCTCGTGCA | 12064 | TGCACGAGGGCTTAAGTGT |
| 9386 | CACTTAAGCCCTCGTGCAC | 12065 | GTGCACGAGGGCTTAAGTG |
| 9387 | ACTTAAGCCCTCGTGCACA | 12066 | TGTGCACGAGGGCTTAAGT |
| 9388 | CTTAAGCCCTCGTGCACAC | 12067 | GTGTGCACGAGGGCTTAAG |
| 9389 | TTAAGCCCTCGTGCACACA | 12068 | TGTGTGCACGAGGGCTTAA |
| 9390 | TAAGCCCTCGTGCACACAC | 12069 | GTGTGTGCACGAGGGCTTA |
| 9391 | AAGCCCTCGTGCACACACA | 12070 | TGTGTGTGCACGAGGGCTT |
| 9392 | AGCCCTCGTGCACACACAC | 12071 | GTGTGTGTGCACGAGGGCT |
| 9393 | GCCCTCGTGCACACACACA | 12072 | TGTGTGTGTGCACGAGGGC |
| 9394 | CCCTCGTGCACACACACAA | 12073 | TTGTGTGTGTGCACGAGGG |
| 9395 | CCTCGTGCACACACACAAA | 12074 | TTTGTGTGTGTGCACGAGG |
| 9396 | CTCGTGCACACACACAAAT | 12075 | ATTTGTGTGTGTGGACGAG |
| 9397 | TCGTGCACACACACAAATT | 12076 | AATTTGTGTGTGTGGACGA |
| 9398 | CGTGCACACACACAAATTA | 12077 | TAATTTGTGTGTGTGCACG |
| 9399 | GTGCACACACACAAATTAT | 12078 | ATAATTTGTGTGTGTGCAC |
| 9400 | TGCACACACACAAATTATT | 12079 | AATAATTTGTGTGTGTGCA |
| 9401 | GCACACACACAAATTATTC | 12080 | GAATAATTTGTGTGTGTGC |
| 9402 | CACACACACAAATTATTCA | 12081 | TGAATAATTTGTGTGTGTG |
| 9403 | ACACACACAAATTATTCAG | 12082 | CTGAATAATTTGTGTGTGT |
| 9404 | CACACACAAATTATTCAGA | 12083 | TCTGAATAATTTGTGTGTG |
| 9405 | ACACACAAATTATTCAGAT | 12084 | ATCTGAATAATTTGTGTGT |
| 9406 | CACACAAATTATTCAGATG | 12085 | CATCTGAATAATTTGTGTG |
| 9407 | ACACAAATTATTCAGATGT | 12086 | ACATCTGAATAATTTGTGT |
| 9408 | CACAAATTATTCAGATGTA | 12087 | TACATCTGAATAATTTGTG |
| 9409 | ACAAATTATTCAGATGTAC | 12088 | GTACATCTGAATAATTTGT |
| 9410 | CAAATTATTCAGATGTACA | 12089 | TGTACATCTGAATAATTTG |
| 9411 | AAATTATTCAGATGTACAC | 12090 | GTGTACATCTGAATAATTT |
| 9412 | AATTATTCAGATGTACACC | 12091 | GGTGTACATCTGAATAATT |
| 9413 | ATTATTCAGATGTACACCC | 12092 | GGGTGTACATCTGAATAAT |
| 9414 | TTATTCAGATGTACACCCA | 12093 | TGGGTGTACATCTGAATAA |
| 9415 | TATTCAGATGTACACCCAC | 12094 | GTGGGTGTACATCTGAATA |
| 9416 | ATTCAGATGTACAGCCACC | 12095 | GGTGGGTGTACATCTGAAT |
| 9417 | TTCAGATGTACACCCACCC | 12096 | GGGTGGGTGTACATCTGAA |
| 9418 | TCAGATGTACACCCACCCA | 12097 | TGGGTGGGTGTACATCTGA |
| 9419 | CAGATGTACACCCACCCAC | 12098 | GTGGGTGGGTGTACATCTG |
| 9420 | AGATGTACACCCACCCACA | 12099 | TGTGGGTGGGTGTACATCT |
| 9421 | GATGTACACCCACCCACAT | 12100 | ATGTGGGTGGGTGTACATC |
| 9422 | ATGTACACCCACCCACATA | 12101 | TATGTGGGTGGGTGTACAT |
| 9423 | TGTACACCCACCCACATAT | 12102 | ATATGTGGGTGGGTGTACA |
| 9424 | GTACACCCACCCACATATC | 12103 | GATATGTGGGTGGGTGTAC |
| 9425 | TACACCCACCGACATATCT | 12104 | AGATATGTGGGTGGGTGTA |
| 9426 | ACACCCACCCACATATCTT | 12105 | AAGATATGTGGGTGGGTGT |
| 9427 | CACCCACCCACATATCTTA | 12106 | TAAGATATGTGGGTGGGTG |
| 9428 | ACCCACCCAGATATCTTAC | 12107 | GTAAGATATGTGGGTGGGT |
| 9429 | CCCACCCACATATCTTACA | 12108 | TGTAAGATATGTGGGTGGG |
| 9430 | CCACCCACATATCTTACAG | 12109 | CTGTAAGATATGTGGGTGG |
| 9431 | CACCCACATATCTTACAGC | 12110 | GCTGTAAGATATGTGGGTG |
| 9432 | ACCCACATATCTTACAGCC | 12111 | GGCTGTAAGATATGTGGGT |
| 9433 | CCCACATATCTTACAGCCA | 12112 | TGGCTGTAAGATATGTGGG |
| 9434 | CCACATATCTTACAGCCAG | 12113 | CTGGCTGTAAGATATGTGG |
| 9435 | CACATATCTTACAGCCAGA | 12114 | TCTGGCTGTAAGATATGTG |
| 9436 | ACATATCTTACAGCCAGAG | 12115 | CTCTGGCTGTAAGATATGT |
| 9437 | CATATCTTACAGCCAGAGG | 12116 | CCTCTGGCTGTAAGATATG |
| 9438 | ATATCTTACAGCCAGAGGA | 12117 | TCCTCTGGCTGTAAGATAT |
| 9439 | TATCTTACAGCCAGAGGAA | 12118 | TTCCTCTGGCTGTAAGATA |
| 9440 | ATCTTACAGCCAGAGGAAC | 12119 | GTTCCTCTGGCTGTAAGAT |
| 9441 | TCTTACAGCCAGAGGAACC | 12120 | GGTTCCTCTGGCTGTAAGA |
| 9442 | CTTACAGCCAGAGGAACCA | 12121 | TGGTTCCTCTGGCTGTAAG |
| 9443 | TTACAGCCAGAGGAACCAG | 12122 | CTGGTTCCTCTGGCTGTAA |
| 9444 | TACAGCCAGAGGAACCAGC | 12123 | GCTGGTTCCTCTGGCTGTA |
| 9445 | ACAGCCAGAGGAACCAGCA | 12124 | TGCTGGTTCCTCTGGCTGT |
| 9446 | CAGCCAGAGGAACCAGCAC | 12125 | GTGCTGGTTCCTCTGGCTG |
| 9447 | AGCCAGAGGAACCAGCACT | 12126 | AGTGCTGGTTCCTCTGGCT |
| 9448 | GCCAGAGGAACCAGCACTC | 12127 | GAGTGCTGGTTCCTCTGGC |
| 9449 | CCAGAGGAACCAGCACTCC | 12128 | GGAGTGCTGGTTCCTCTGG |
| 9450 | CAGAGGAACCAGCACTCCA | 12129 | TGGAGTGCTGGTTCCTCTG |
| 9451 | AGAGGAACCAGCACTCCAT | 12130 | ATGGAGTGCTGGTTCCTCT |
| 9452 | GAGGAACCAGCACTCCATC | 12131 | GATGGAGTGCTGGTTCCTC |
| 9453 | AGGAAGCAGCACTCCATGA | 12132 | TGATGGAGTGCTGGTTCCT |
| 9454 | GGAACCAGCACTCCATCAC | 12133 | GTGATGGAGTGCTGGTTCC |
| 9455 | GAACCAGGACTCCATCACT | 12134 | AGTGATGGAGTGCTGGTTC |
| 9456 | AAGCAGCACTCCATCACTG | 12135 | CAGTGATGGAGTGCTGGTT |
| 9457 | ACCAGCACTCCATCACTGA | 12136 | TCAGTGATGGAGTGCTGGT |
| 9458 | CCAGCACTCCATCACTGAG | 12137 | CTCAGTGATGGAGTGCTGG |
| 9459 | GAGCACTCCATCAGTGAGA | 12138 | TCTCAGTGATGGAGTGCTG |
| 9460 | AGCACTCCATCACTGAGAG | 12139 | CTCTCAGTGATGGAGTGCT |
| 9461 | GCACTCCATCACTGAGAGC | 12140 | GCTCTCAGTGATGGAGTGC |
| 9462 | CACTCCATCACTGAGAGCC | 12141 | GGCTCTCAGTGATGGAGTG |
| 9463 | ACTCCATCACTGAGAGCCC | 12142 | GGGCTCTCAGTGATGGAGT |
| 9464 | CTCCATCACTGAGAGCCCG | 12143 | CGGGCTCTCAGTGATGGAG |
| 9465 | TCCATCACTGAGAGCCCGA | 12144 | TCGGGCTCTCAGTGATGGA |
| 9466 | CCATCACTGAGAGCCCGAC | 12145 | GTCGGGCTCTCAGTGATGG |
| 9467 | CATCACTGAGAGCCCGACT | 12146 | AGTCGGGCTCTCAGTGATG |
| 9468 | ATCACTGAGAGCCCGACTT | 12147 | AAGTCGGGCTCTCAGTGAT |
| 9469 | TCACTGAGAGCCCGACTTC | 12148 | GAAGTCGGGCTCTCAGTGA |
| 9470 | CACTGAGAGCCCGACTTCG | 12149 | CGAAGTCGGGCTCTCAGTG |
| 9471 | ACTGAGAGCCCGACTTCGT | 12150 | ACGAAGTCGGGCTCTCAGT |
| 9472 | CTGAGAGCCCGACTTCGTT | 12151 | AACGAAGTCGGGCTCTCAG |
| 9473 | TGAGAGCCCGACTTCGTTT | 12152 | AAACGAAGTCGGGCTCTCA |
| 9474 | GAGAGCCCGACTTCGTTTC | 12153 | GAAACGAAGTCGGGCTCTC |
| 9475 | AGAGCCCGACTTCGTTTCT | 12154 | AGAAACGAAGTCGGGCTCT |
| 9476 | GAGCCCGACTTCGTTTCTG | 12155 | CAGAAACGAAGTCGGGCTC |
| 9477 | AGCCCGACTTCGTTTCTGG | 12156 | CCAGAAACGAAGTCGGGCT |
| 9478 | GCCCGACTTCGTTTCTGGG | 12157 | CCCAGAAACGAAGTCGGGC |
| 9479 | CCCGACTTCGTTTCTGGGG | 12158 | CCCCAGAAACGAAGTCGGG |
| 9480 | CCGACTTCGTTTCTGGGGC | 12159 | GCCCCAGAAACGAAGTCGG |
| 9481 | CGACTTCGTTTCTGGGGCA | 12160 | TGCCCCAGAAACGAAGTCG |
| 9482 | GAGTTCGTTTCTGGGGCAA | 12161 | TTGCCCCAGAAACGAAGTC |
| 9483 | ACTTCGTTTCTGGGGCAAC | 12162 | GTTGCCCCAGAAACGAAGT |
| 9484 | CTTCGTTTCTGGGGCAACT | 12163 | AGTTGCCCCAGAAACGAAG |
| 9485 | TTCGTTTCTGGGGCAACTG | 12164 | CAGTTGCCCCAGAAACGAA |
| 9486 | TCGTTTCTGGGGCAACTGA | 12165 | TCAGTTGCCCCAGAAACGA |
| 9487 | CGTTTCTGGGGCAACTGAG | 12166 | CTCAGTTGCCCCAGAAACG |
| 9488 | GTTTCTGGGGCAACTGAGA | 12167 | TCTCAGTTGCCCCAGAAAC |
| 9489 | TTTCTGGGGCAACTGAGAG | 12168 | CTCTCAGTTGCCCCAGAAA |
| 9490 | TTCTGGGGCAACTGAGAGC | 12169 | GCTCTCAGTTGCCCCAGAA |
| 9491 | TCTGGGGCAACTGAGAGCT | 12170 | AGCTCTCAGTTGCCCCAGA |
| 9492 | CTGGGGCAACTGAGAGCTG | 12171 | CAGCTCTCAGTTGCCCCAG |
| 9493 | TGGGGCAACTGAGAGCTGA | 12172 | TCAGCTCTCAGTTGCCCCA |
| 9494 | GGGGGAACTGAGAGCTGAG | 12173 | CTCAGCTCTCAGTTGCCGC |
| 9495 | GGGCAACTGAGAGCTGAGC | 12174 | GCTCAGCTCTCAGTTGCCC |
| 9496 | GGCAACTGAGAGCTGAGCG | 12175 | CGCTCAGCTGTCAGTTGCC |
| 9497 | GCAACTGAGAGCTGAGCGC | 12176 | GCGCTCAGCTCTCAGTTGC |
| 9498 | CAACTGAGAGCTGAGCGCT | 12177 | AGCGCTCAGCTCTCAGTTG |
| 9499 | AACTGAGAGCTGAGCGCTT | 12178 | AAGCGCTCAGCTCTCAGTT |
| 9500 | ACTGAGAGCTGAGCGCTTT | 12179 | AAAGCGCTCAGCTCTCAGT |
| 9501 | GTGAGAGCTGAGCGCTTTG | 12180 | CAAAGCGCTCAGCTCTCAG |
| 9502 | TGAGAGCTGAGCGCTTTGC | 12181 | GCAAAGCGCTCAGCTCTCA |
| 9503 | GAGAGCTGAGCGCTTTGCT | 12182 | AGCAAAGCGCTCAGCTCTC |
| 9504 | AGAGCTGAGCGCTTTGCTT | 12183 | AAGCAAAGCGCTCAGCTCT |
| 9505 | GAGCTGAGCGCTTTGCTTA | 12184 | TAAGCAAAGCGCTCAGCTC |
| 9506 | AGCTGAGCGCTTTGCTTAC | 12185 | GTAAGCAAAGCGCTCAGCT |
| 9507 | GCTGAGCGCTTTGCTTACC | 12186 | GGTAAGCAAAGCGCTCAGC |
| 9508 | CTGAGCGCTTTGCTTACCA | 12187 | TGGTAAGCAAAGCGCTCAG |
| 9509 | TGAGCGCTTTGCTTACCAA | 12188 | TTGGTAAGCAAAGCGCTCA |
| 9510 | GAGCGCTTTGCTTACCAAA | 12189 | TTTGGTAAGCAAAGCGCTC |
| 9511 | AGCGCTTTGCTTACCAAAA | 12190 | TTTTGGTAAGCAAAGCGCT |
| 9512 | GCGCTTTGCTTACCAAAAG | 12191 | CTTTTGGTAAGCAAAGCGC |
| 9513 | CGCTTTGCTTACCAAAAGC | 12192 | GCTTTTGGTAAGCAAAGCG |
| 9514 | GCTTTGCTTACCAAAAGCT | 12193 | AGCTTTTGGTAAGCAAAGC |
| 9515 | CTTTGCTTACCAAAAGCTC | 12194 | GAGCTTTTGGTAAGCAAAG |
| 9516 | TTTGCTTACCAAAAGCTCA | 12195 | TGAGCTTTTGGTAAGCAAA |
| 9517 | TTGCTTACCAAAAGCTCAG | 12196 | CTGAGCTTTTGGTAAGCAA |
| 9518 | TGCTTACCAAAAGCTCAGG | 12197 | CCTGAGCTTTTGGTAAGCA |
| 9519 | GCTTACCAAAAGCTCAGGG | 12198 | CCCTGAGCTTTTGGTAAGC |
| 9520 | CTTACCAAAAGCTCAGGGC | 12199 | GCCCTGAGCTTTTGGTAAG |
| 9521 | TTACCAAAAGCTCAGGGCC | 12200 | GGCCCTGAGCTTTTGGTAA |
| 9522 | TACCAAAAGCTCAGGGCCC | 12201 | GGGCCCTGAGCTTTTGGTA |
| 9523 | ACCAAAAGCTCAGGGCCCT | 12202 | AGGGCCCTGAGCTTTTGGT |
| 9524 | CCAAAAGCTCAGGGCCCTG | 12203 | CAGGGCCCTGAGCTTTTGG |
| 9525 | CAAAAGCTCAGGGCCCTGT | 12204 | ACAGGGCCCTGAGCTTTTG |
| 9526 | AAAAGCTCAGGGCCCTGTG | 12205 | CACAGGGCCCTGAGCTTTT |
| 9527 | AAAGCTCAGGGCCCTGTGC | 12206 | GCACAGGGCCCTGAGCTTT |
| 9528 | AAGCTCAGGGCCCTGTGCC | 12207 | GGCACAGGGCCCTGAGCTT |
| 9529 | AGCTCAGGGCCCTGTGCCA | 12208 | TGGCACAGGGCCCTGAGCT |
| 9530 | GCTCAGGGCCCTGTGCCAG | 12209 | CTGGCACAGGGCCCTGAGC |
| 9531 | CTCAGGGCCCTGTGCCAGG | 12210 | CCTGGCACAGGGCCCTGAG |
| 9532 | TCAGGGCCCTGTGCCAGGC | 12211 | GCCTGGCACAGGGCCCTGA |
| 9533 | CAGGGCCCTGTGCCAGGCC | 12212 | GGCCTGGCACAGGGCCCTG |
| 9534 | AGGGCCCTGTGCCAGGCCA | 12213 | TGGCCTGGCACAGGGCCCT |
| 9535 | GGGCCCTGTGCCAGGCCAA | 12214 | TTGGCCTGGCACAGGGCCC |
| 9536 | GGCCCTGTGCCAGGCCAAA | 12215 | TTTGGCCTGGCACAGGGCC |
| 9537 | GCCCTGTGCCAGGCCAAAG | 12216 | CTTTGGCCTGGCACAGGGC |
| 9538 | CCCTGTGCCAGGCGAAAGA | 12217 | TCTTTGGCCTGGCACAGGG |
| 9539 | CCTGTGCCAGGCCAAAGAT | 12218 | ATCTTTGGCCTGGCACAGG |
| 9540 | CTGTGCCAGGCCAAAGATC | 12219 | GATCTTTGGCCTGGCACAG |
| 9541 | TGTGCCAGGCCAAAGATCC | 12220 | GGATCTTTGGCCTGGCACA |
| 9542 | GTGCCAGGCCAAAGATCCC | 12221 | GGGATCTTTGGCCTGGCAG |
| 9543 | TGCCAGGCCAAAGATCCCC | 12222 | GGGGATCTTTGGCCTGGCA |
| 9544 | GCCAGGCCAAAGATCCCCC | 12223 | GGGGGATCTTTGGCCTGGC |
| 9545 | CCAGGCCAAAGATCGCCCC | 12224 | GGGGGGATCTTTGGCCTGG |
| 9546 | CAGGCCAAAGATCCCCCCA | 12225 | TGGGGGGATCTTTGGCCTG |
| 9547 | AGGCCAAAGATCCCCCCAG | 12226 | CTGGGGGGATCTTTGGCCT |
| 9548 | GGCCAAAGATCCCCCCAGA | 12227 | TCTGGGGGGATCTTTGGCC |
| 9549 | GCCAAAGATCCCCCCAGAC | 12228 | GTCTGGGGGGATCTTTGGC |
| 9550 | CCAAAGATCCCCCCAGACC | 12229 | GGTCTGGGGGGATCTTTGG |
| 9551 | CAAAGATCCCCCCAGACCC | 12230 | GGGTCTGGGGGGATCTTTG |
| 9552 | AAAGATCCCCCCAGACCCC | 12231 | GGGGTCTGGGGGGATCTTT |
| 9553 | AAGATCCCCCCAGACCCCC | 12232 | GGGGGTCTGGGGGGATCTT |
| 9554 | AGATCCCCCCAGACCCCCA | 12233 | TGGGGGTCTGGGGGGATCT |
| 9555 | GATCCCCCCAGACCCCCAT | 12234 | ATGGGGGTCTGGGGGGATC |
| 9556 | ATCCCCCCAGACCCCCATT | 12235 | AATGGGGGTCTGGGGGGAT |
| 9557 | TCCCCCCAGACCCCCATTC | 12236 | GAATGGGGGTCTGGGGGGA |
| 9558 | CCCCCCAGACCCCCATTCT | 12237 | AGAATGGGGGTCTGGGGGG |
| 9559 | CCCCCAGACCCCCATTCTG | 12238 | CAGAATGGGGGTCTGGGGG |
| 9560 | CCCCAGACCCCCATTCTGA | 12239 | TCAGAATGGGGGTCTGGGG |
| 9561 | CCCAGACCCCCATTCTGAC | 12240 | GTCAGAATGGGGGTCTGGG |
| 9562 | CCAGACCCCCATTCTGACA | 12241 | TGTCAGAATGGGGGTCTGG |
| 9563 | CAGACCCCCATTCTGACAT | 12242 | ATGTCAGAATGGGGGTCTG |
| 9564 | AGACCCCCATTCTGACATC | 12243 | GATGTCAGAATGGGGGTCT |
| 9565 | GACCCCCATTCTGACATCC | 12244 | GGATGTCAGAATGGGGGTC |
| 9566 | ACCCCCATTCTGACATCCA | 12245 | TGGATGTCAGAATGGGGGT |
| 9567 | CCCCCATTCTGACATCCAC | 12246 | GTGGATGTCAGAATGGGGG |
| 9568 | CCCCATTCTGACATCCACA | 12247 | TGTGGATGTCAGAATGGGG |
| 9569 | CCCATTCTGACATCCACAT | 12248 | ATGTGGATGTCAGAATGGG |
| 9570 | CCATTCTGACATCCACATG | 12249 | CATGTGGATGTCAGAATGG |
| 9571 | CATTCTGACATCCACATGC | 12250 | GCATGTGGATGTCAGAATG |
| 9572 | ATTCTGACATCCACATGCT | 12251 | AGCATGTGGATGTCAGAAT |
| 9573 | TTCTGACATCCACATGCTC | 12252 | GAGCATGTGGATGTCAGAA |
| 9574 | TCTGACATCCACATGCTCT | 12253 | AGAGCATGTGGATGTCAGA |
| 9575 | CTGACATCCACATGCTCTG | 12254 | CAGAGCATGTGGATGTCAG |
| 9576 | TGACATCCACATGCTCTGC | 12255 | GCAGAGCATGTGGATGTCA |
| 9577 | GACATCCACATGCTCTGCA | 12256 | TGCACAGCATGTGGATGTC |
| 9578 | ACATCCACATGCTCTGCAG | 12257 | CTGCAGAGCATGTGGATGT |
| 9579 | CATCCACATGCTGTGCAGT | 12258 | ACTGCAGAGCATGTGGATG |
| 9580 | ATCCACATGCTCTGCAGTC | 12259 | GACTGCAGAGCATGTGGAT |
| 9581 | TCCACATGCTCTGCAGTCC | 12260 | GGAGTGCAGAGCATGTGGA |
| 9582 | CCACATGCTCTGCAGTCCT | 12261 | AGGACTGCAGAGCATGTGG |
| 9583 | CACATGCTCTGCAGTCCTG | 12262 | CAGGACTGCAGAGCATGTG |
| 9584 | ACATGCTCTGCAGTCCTGG | 12263 | CCAGGACTGCAGAGCATGT |
| 9585 | CATGCTCTGCAGTCCTGGC | 12264 | GCCAGGACTGCAGAGCATG |
| 9586 | ATGCTCTGCAGTCCTGGCC | 12265 | GGCCAGGACTGGAGAGCAT |
| 9587 | TGCTCTGCAGTCCTGGCCC | 12266 | GGGCCAGGACTGCAGAGCA |
| 9588 | GCTCTGCAGTCCTGGCCCC | 12267 | GGGGCCAGGACTGCAGAGC |
| 9589 | CTCTGCAGTCCTGGCCCCC | 12268 | GGGGGCCAGGACTGCAGAG |
| 9590 | TCTGCAGTCCTGGCCCCCT | 12269 | AGGGGGCCAGGACTGCAGA |
| 9591 | CTGCAGTCCTGGCCCCCTC | 12270 | GAGGGGGCCAGGACTGCAG |
| 9592 | TGCAGTCCTGGCCCCCTCG | 12271 | CGAGGGGGCCAGGACTGCA |
| 9593 | GCAGTCCTGGCCCCCTCGT | 12272 | ACGAGGGGGCCAGGACTGC |
| 9594 | CAGTCCTGGCCCCCTCGTC | 12273 | GACGAGGGGGCCAGGACTG |
| 9595 | AGTCCTGGCCCCCTCGTCA | 12274 | TGACGAGGGGGCCAGGACT |
| 9596 | GTCCTGGCCCCCTCGTCAT | 12275 | ATGACGAGGGGGCCAGGAC |
| 9597 | TCCTGGCCCCCTCGTCATT | 12276 | AATGACGAGGGGGCCAGGA |
| 9598 | CCTGGCCCCCTCGTCATTT | 12277 | AAATGACGAGGGGGCCAGG |
| 9599 | CTGGCCCCCTCGTCATTTT | 12278 | AAAATGACGAGGGGGCCAG |
| 9600 | TGGCCCCCTCGTCATTTTC | 12279 | GAAAATGACGAGGGGGCCA |
| 9601 | GGCCCCCTCGTCATTTTCT | 12280 | AGAAAATGACGAGGGGGCC |
| 9602 | GCCCCCTCGTCATTTTCTT | 12281 | AAGAAAATGACGAGGGGGC |
| 9603 | CCCCCTCGTCATTTTCTTT | 12282 | AAAGAAAATGACGAGGGGG |
| 9604 | CCCCTCGTCATTTTCTTTC | 12283 | GAAAGAAAATGACGAGGGG |
| 9605 | CCCTCGTCATTTTCTTTCC | 12284 | GGAAAGAAAATGACGAGGG |
| 9606 | CCTCGTCATTTTCTTTCCC | 12285 | GGGAAAGAAAATGACGAGG |
| 9607 | CTCGTCATTTTCTTTCCCA | 12286 | TGGGAAAGAAAATGACGAG |
| 9608 | TCGTCATTTTCTTTCCCAG | 12287 | CTGGGAAAGAAAATGACGA |
| 9609 | CGTCATTTTCTTTCCCAGA | 12288 | TCTGGGAAAGAAAATGACG |
| 9610 | GTCATTTTCTTTCCCAGAA | 12289 | TTCTGGGAAAGAAAATGAC |
| 9611 | TCATTTTCTTTCCCAGAAG | 12290 | CTTCTGGGAAAGAAAATGA |
| 9612 | CATTTTCTTTCCCAGAAGC | 12291 | GCTTCTGGGAAAGAAAATG |
| 9613 | ATTTTCTTTCCCAGAAGCG | 12292 | CGCTTCTGGGAAAGAAAAT |
| 9614 | TTTTCTTTCCCAGAAGCGC | 12293 | GCGCTTCTGGGAAAGAAAA |
| 9615 | TTTCTTTCCCAGAAGCGCC | 12294 | GGCGCTTCTGGGAAAGAAA |
| 9616 | TTCTTTCCCAGAAGCGCCC | 12295 | GGGCGCTTCTGGGAAAGAA |
| 9617 | TCTTTCCCAGAAGCGCCCT | 12296 | AGGGCGCTTCTGGGAAAGA |
| 9618 | CTTTCCCAGAAGCGCCCTG | 12297 | CAGGGCGCTTCTGGGAAAG |
| 9619 | TTTCCCAGAAGCGCCCTGT | 12298 | ACAGGGCGCTTCTGGGAAA |
| 9620 | TTCCCAGAAGCGCCCTGTA | 12299 | TACAGGGCGCTTCTGGGAA |
| 9621 | TCCCAGAAGCGCCCTGTAT | 12300 | ATACAGGGCGCTTCTGGGA |
| 9622 | CCCAGAAGCGCCCTGTATT | 12301 | AATACAGGGCGCTTCTGGG |
| 9623 | CCAGAAGCGGGCTGTATTT | 12302 | AAATACAGGGCGCTTCTGG |
| 9624 | CAGAAGCGCCCTGTATTTA | 12303 | TAAATACAGGGCGCTTCTG |
| 9625 | AGAAGCGCCCTGTATTTAT | 12304 | ATAAATACAGGGCGCTTCT |
| 9626 | GAAGCGCCCTGTATTTATT | 12305 | AATAAATACAGGGCGCTTC |
| 9627 | AAGCGCCCTGTATTTATTC | 12306 | GAATAAATACAGGGCGCTT |
| 9628 | AGCGCCCTGTATTTATTCC | 12307 | GGAATAAATACAGGGCGCT |
| 9629 | GCGCCCTGTATTTATTCCC | 12308 | GGGAATAAATACAGGGCGC |
| 9630 | CGCCCTGTATTTATTCCCC | 12309 | GGGGAATAAATACAGGGCG |
| 9631 | GCCCTGTATTTATTCCCCC | 12310 | GGGGGAATAAATACAGGGC |
| 9632 | CCCTGTATTTATTCCCCCA | 12311 | TGGGGGAATAAATACAGGG |
| 9633 | CCTGTATTTATTCCCCCAT | 12312 | ATGGGGGAATAAATACAGG |
| 9634 | CTGTATTTATTCCCGCATC | 12313 | GATGGGGGAATAAATACAG |
| 9635 | TGTATTTATTCCCCCATCT | 12314 | AGATGGGGGAATAAATACA |
| 9636 | GTATTTATTCGCCCATCTT | 12315 | AAGATGGGGGAATAAATAC |
| 9637 | TATTTATTCCCCCATCTTC | 12316 | GAAGATGGGGGAATAAATA |
| 9638 | ATTTATTCCCCCATCTTCA | 12317 | TGAAGATGGGGGAATAAAT |
| 9639 | TTTATTCCCCCATCTTCAT | 12318 | ATGAAGATGGGGGAATAAA |
| 9640 | TTATTCCCCCATCTTCATC | 12319 | GATGAAGATGGGGGAATAA |
| 9641 | TATTCCCCCATCTTCATCC | 12320 | GGATGAAGATGGGGGAATA |
| 9642 | ATTCCCCCATCTTCATCCC | 12321 | GGGATGAAGATGGGGGAAT |
| 9643 | TTCCCCCATCTTCATCCCA | 12322 | TGGGATGAAGATGGGGGAA |
| 9644 | TCCCCCATCTTCATCCCAA | 12323 | TTGGGATGAAGATGGGGGA |
| 9645 | CCCCCATCTTCATCCCAAC | 12324 | GTTGGGATGAAGATGGGGG |
| 9646 | CCCCATCTTCATCCCAACA | 12325 | TGTTGGGATGAAGATGGGG |
| 9647 | CCCATCTTCATCCCAACAG | 12326 | CTGTTGGGATGAAGATGGG |
| 9648 | CCATCTTCATCCCAACAGC | 12327 | GCTGTTGGGATGAAGATGG |
| 9649 | CATCTTCATCCCAACAGCC | 12328 | GGCTGTTGGGATGAAGATG |
| 9650 | ATCTTCATCCCAACAGCCC | 12329 | GGGCTGTTGGGATGAAGAT |
| 9651 | TCTTCATCCCAACAGCCCA | 12330 | TGGGCTGTTGGGATGAAGA |
| 9652 | CTTCATCCCAACAGCCCAG | 12331 | CTGGGCTGTTGGGATGAAG |
| 9653 | TTCATCCCAACAGCCCAGC | 12332 | GCTGGGCTGTTGGGATGAA |
| 9654 | TCATCCCAACAGCCCAGCA | 12333 | TGCTGGGCTGTTGGGATGA |
| 9655 | CATCCCAACAGCCCAGCAA | 12334 | TTGCTGGGCTGTTGGGATG |
| 9656 | ATCCCAACAGCCCAGCAAG | 12335 | CTTGCTGGGCTGTTGGGAT |
| 9657 | TCCCAACAGCCCAGCAAGA | 12336 | TCTTGCTGGGCTGTTGGGA |
| 9658 | CCCAACAGCCCAGCAAGAA | 12337 | TTCTTGCTGGGCTGTTGGG |
| 9659 | CCAACAGCCCAGCAAGAAG | 12338 | CTTCTTGCTGGGCTGTTGG |
| 9660 | CAACAGCCCAGCAAGAAGG | 12339 | CCTTCTTGCTGGGCTGTTG |
| 9661 | AACAGCCCAGCAAGAAGGA | 12340 | TCCTTCTTGCTGGGCTGTT |
| 9662 | ACAGCCCAGCAAGAAGGAG | 12341 | CTCCTTCTTGCTGGGCTGT |
| 9663 | CAGCCCAGCAAGAAGGAGG | 12342 | CCTCCTTCTTGCTGGGCTG |
| 9664 | AGCCCAGCAAGAAGGAGGA | 12343 | TCCTCCTTCTTGCTGGGCT |
| 9665 | GCCCAGCAAGAAGGAGGAG | 12344 | CTCCTCCTTCTTGCTGGGC |
| 9666 | CCCAGCAAGAAGGAGGAGA | 12345 | TCTCCTCCTTCTTGCTGGG |
| 9667 | CCAGCAAGAAGGAGGAGAC | 12346 | GTCTCCTCCTTCTTGCTGG |
| 9668 | CAGCAAGAAGGAGGAGACA | 12347 | TGTCTCCTCCTTCTTGCTG |
| 9669 | AGCAAGAAGGAGGAGACAG | 12348 | CTGTCTCCTCCTTCTTGCT |
| 9670 | GCAAGAAGGAGGAGACAGA | 12349 | TCTGTCTCCTCCTTCTTGC |
| 9671 | CAAGAAGGAGGAGACAGAG | 12350 | CTCTGTCTCCTCCTTCTTG |
| 9672 | AAGAAGGAGGAGACAGAGA | 12351 | TGTCTGTCTCCTCCTTCTT |
| 9673 | AGAAGGAGGAGACAGAGAG | 12352 | CTCTCTGTCTCCTCCTTCT |
| 9674 | GAAGGAGGAGACAGAGAGC | 12353 | GCTCTCTGTCTCCTCCTTC |
| 9675 | AAGGAGGAGACAGAGAGCT | 12354 | AGCTCTCTGTCTCCTCCTT |
| 9676 | AGGAGGAGACAGAGAGCTC | 12355 | GAGCTCTCTGTCTCCTCCT |
| 9677 | GGAGGAGACAGAGAGCTCC | 12356 | GGAGCTCTCTGTCTCCTCC |
| 9678 | GAGGAGACAGAGAGCTCCT | 12357 | AGGAGCTCTCTGTCTCCTC |
| 9679 | AGGAGACAGAGAGCTCCTC | 12358 | GAGGAGCTCTCTGTCTCCT |
| 9680 | GGAGACAGAGAGCTCCTCC | 12359 | GGAGGAGCTCTCTGTCTCC |
| 9681 | GAGACAGAGAGCTGCTCCC | 12360 | GGGAGGAGCTCTCTGTCTC |
| 9682 | AGACAGAGAGCTCCTCCCT | 12361 | AGGGACGAGCTCTCTGTCT |
| 9683 | GACAGAGAGCTCCTCCCTG | 12362 | CAGGGAGGAGCTCTCTGTC |
| 9684 | ACAGAGAGCTCCTCCCTGG | 12363 | CCAGGGAGGAGCTCTCTGT |
| 9685 | CAGAGAGCTCCTCCCTGGG | 12364 | CCCAGGGAGGAGCTCTCTG |
| 9686 | AGAGAGCTCCTCCCTGGCT | 12365 | ACCCAGGGAGGAGCTCTCT |
| 9687 | GAGAGCTCCTCCCTGGGTT | 12366 | AACGCAGGGAGGAGCTCTC |
| 9688 | AGAGCTCCTCCCTGGGTTG | 12367 | CAACCCAGGGAGGAGCTCT |
| 9689 | GAGCTCCTCCCTGGGTTGT | 12368 | ACAACCCAGGGAGGAGCTC |
| 9690 | AGCTCCTCCCTGGGTTGTC | 12369 | GACAACCCAGGGAGGAGCT |
| 9691 | GCTCCTCCCTGGGTTGTCT | 12370 | AGACAACCCAGGGAGGAGC |
| 9692 | CTCCTCCCTGGGTTGTCTG | 12371 | CAGACAACCCAGGGAGGAG |
| 9693 | TCCTCCCTGGGTTGTCTGT | 12372 | ACAGACAACCCAGGGAGGA |
| 9694 | CCTCCCTGGGTTGTCTGTG | 12373 | CACAGACAACCCAGGGAGG |
| 9695 | CTCCCTGGGTTGTCTGTGG | 12374 | CCACAGACAACCCAGGGAG |
| 9696 | TCCCTGGGTTGTCTGTGGA | 12375 | TCCACAGACAACCCAGGGA |
| 9697 | CCCTGGGTTGTCTGTCGAC | 12376 | GTCCACAGACAACCCAGGG |
| 9698 | CCTGGGTTGTCTGTGGACC | 12377 | GGTCCACAGACAACCCAGG |
| 9699 | CTGGGTTGTCTGTGGACCC | 12378 | GGGTCCACAGACAACCCAG |
| 9700 | TGGGTTGTCTGTGGACCCC | 12379 | GGGGTCCACAGACAACCCA |
| 9701 | GGGTTGTCTGTGGACCCCC | 12380 | GGGGGTCCACAGACAACCC |
| 9702 | GGTTGTCTGTGGACCCCCC | 12381 | GGGGGGTCCACAGACAACC |
| 9703 | GTTGTCTGTGGACCCCCCC | 12382 | GGGGGGGTCCACAGACAAC |
| 9704 | TTGTCTGTGGACCCCCCCA | 12383 | TGGGGGGGTCCACAGACAA |
| 9705 | TGTCTGTGGACCCCCCCAG | 12384 | CTGGGGGGGTCCACAGACA |
| 9706 | GTCTGTGGACCCCCCCAGG | 12385 | CCTGGGGGGGTCCACAGAC |
| 9707 | TCTGTGGACCCCCCCAGGA | 12386 | TCCTGGGGGGGTCCACAGA |
| 9708 | CTGTGGACCCCCCCAGGAG | 12387 | CTCCTGGGGGGGTCCACAG |
| 9709 | TGTGGACCCCCCCAGGAGC | 12388 | GCTCCTGGGGGGGTCCACA |
| 9710 | GTGGACCCCCCCAGGAGCT | 12389 | AGCTCCTGGGGGGGTCCAC |
| 9711 | TGGACCCCCCCAGGAGCTG | 12390 | CAGCTCCTGGGGGGGTCCA |
| 9712 | GGACCCCCCCAGGAGCTGC | 12391 | GCAGCTCCTGGGGGGGTCC |
| 9713 | GACCCCCCCAGGAGCTGCT | 12392 | AGCAGCTCCTGGGGGGGTC |
| 9714 | ACCCCCCCAGGAGCTGCTA | 12393 | TAGCAGCTCCTGGGGGGGT |
| 9715 | CCCCCCCAGGAGCTGCTAA | 12394 | TTAGCAGCTCCTGGGGGGG |
| 9716 | CCCCCCAGGAGCTGCTAAT | 12395 | ATTAGCAGCTCCTGGGGGG |
| 9717 | CCCCCAGGAGCTGCTAATT | 12396 | AATTAGCAGCTCCTGGGGG |
| 9718 | CCCCAGGAGCTGCTAATTG | 12397 | CAATTAGCAGCTCCTGGGG |
| 9719 | CCCAGGAGCTGCTAATTGG | 12398 | CCAATTAGCAGCTCCTGGG |
| 9720 | CCAGGAGCTGCTAATTGGC | 12399 | GCCAATTAGCAGCTCCTGG |
| 9721 | CAGGAGCTGCTAATTGGCA | 12400 | TGCCAATTAGCAGCTCCTG |
| 9722 | AGGAGCTGCTAATTGGCAG | 12401 | CTGCCAATTAGCAGCTCCT |
| 9723 | GGAGCTGCTAATTGGCAGC | 12402 | GCTGCCAATTAGCAGCTCC |
| 9724 | GAGCTGCTAATTGGCAGCA | 12403 | TGCTGCCAATTAGCAGCTC |
| 9725 | AGCTGCTAATTGGCAGCAC | 12404 | GTGCTGCCAATTAGCAGCT |
| 9726 | GCTGCTAATTGGCAGCACC | 12405 | GGTGCTGCCAATTAGCAGC |
| 9727 | CTGCTAATTGGCAGCACCC | 12406 | GGGTGCTGCCAATTAGCAG |
| 9728 | TGCTAATTGGCAGCACCCA | 12407 | TGGGTGCTGCCAATTAGCA |
| 9729 | GCTAATTGGCAGCACCCAC | 12408 | GTGGGTGCTGCCAATTAGC |
| 9730 | CTAATTGGCAGCACCCACT | 12409 | AGTGGGTGCTGCCAATTAG |
| 9731 | TAATTGGCAGCACCCACTC | 12410 | GAGTGGGTGCTGCCAATTA |
| 9732 | AATTGGCAGCACCCACTCA | 12411 | TGAGTGGGTGCTGCCAATT |
| 9733 | ATTGGCAGCACCCACTCAG | 12412 | CTGAGTGGGTGCTGCCAAT |
| 9734 | TTGGCAGCACCCACTCAGC | 12413 | GCTGAGTGGGTGCTGCCAA |
| 9735 | TGGCAGCACCCAGTCAGCC | 12414 | GGCTGAGTGGGTGCTGCCA |
| 9736 | GGCAGCACCCACTCAGCCA | 12415 | TGGCTGAGTGGGTGCTGCC |
| 9737 | GCAGCACCCACTCAGCCAT | 12416 | ATGGCTGAGTGGGTGCTGC |
| 9738 | CAGCACCCACTCAGCCATT | 12417 | AATGGCTGAGTGGGTGCTG |
| 9739 | AGCACCCACTCAGCCATTC | 12418 | GAATGGCTGAGTGGGTGCT |
| 9740 | GCACCCACTCAGCCATTCT | 12419 | AGAATGGCTGAGTGGGTGC |
| 9741 | CACCCACTCAGCCATTCTC | 12420 | GAGAATGGCTGAGTGGGTG |
| 9742 | ACCCACTCAGCCATTCTCT | 12421 | AGAGAATGGCTGAGTGGGT |
| 9743 | CCCACTCAGCCATTCTCTA | 12422 | TAGAGAATGGCTGAGTGGG |
| 9744 | CCACTCAGCCATTCTCTAC | 12423 | GTAGAGAATGGCTGAGTGG |
| 9745 | CACTCAGCCATTCTCTACC | 12424 | GGTAGAGAATGGCTGAGTG |
| 9746 | ACTCAGCCATTCTCTACCC | 12425 | GGGTAGAGAATGGCTGAGT |
| 9747 | CTCAGCCATTCTCTACCCA | 12426 | TGGGTAGAGAATGGCTGAG |
| 9748 | TCAGCCATTCTCTACCCAT | 12427 | ATGGGTAGAGAATGGCTGA |
| 9749 | CAGCCATTCTCTACCCATC | 12428 | GATGGGTAGAGAATGGCTG |
| 9750 | AGCCATTCTCTACCCATCC | 12429 | GGATGGGTAGAGAATGGCT |
| 9751 | GCCATTCTCTACCCATCCT | 12430 | AGGATGGGTAGAGAATGGC |
| 9752 | CCATTCTCTACCCATCCTT | 12431 | AAGGATGGGTAGAGAATGG |
| 9753 | CATTCTCTACCCATCCTTA | 12432 | TAAGGATGGGTAGAGAATG |
| 9754 | ATTCTCTACCCATCCTTAG | 12433 | CTAAGGATGGGTAGAGAAT |
| 9755 | TTCTCTACCCATCCTTAGT | 12434 | ACTAAGGATGGGTAGAGAA |
| 9756 | TCTCTACCCATCCTTAGTA | 12435 | TACTAAGGATGGGTAGAGA |
| 9757 | CTCTACCCATCCTTAGTAC | 12436 | GTACTAAGGATGGGTAGAG |
| 9758 | TCTACCCATCCTTAGTAGA | 12437 | TGTACTAAGGATGGGTAGA |
| 9759 | CTACCCATCCTTAGTACAT | 12438 | ATGTACTAAGGATGGGTAG |
| 9760 | TACCCATCCTTAGTACATG | 12439 | CATGTACTAAGGATGGGTA |
| 9761 | ACCCATCCTTAGTACATGC | 12440 | GCATGTACTAAGGATGGGT |
| 9762 | CCCATCCTTAGTACATGCT | 12441 | AGCATGTACTAAGGATGGG |
| 9763 | CCATCCTTAGTACATGCTC | 12442 | GAGCATGTACTAAGGATGG |
| 9764 | CATCCTTAGTACATGCTCT | 12443 | AGAGCATGTACTAAGGATG |
| 9765 | ATCCTTAGTACATGCTCTG | 12444 | CAGAGCATGTACTAAGGAT |
| 9766 | TCCTTAGTACATGCTCTGT | 12445 | ACAGAGCATGTACTAAGGA |
| 9767 | CCTTAGTACATGCTCTGTC | 12446 | GACAGAGCATGTACTAAGG |
| 9768 | CTTAGTACATGCTCTGTCC | 12447 | GGACAGAGCATGTACTAAG |
| 9769 | TTAGTACATGCTCTGTCCA | 12448 | TGGACAGAGCATGTACTAA |
| 9770 | TAGTACATGCTCTGTCCAG | 12449 | CTGGACAGAGCATGTACTA |
| 9771 | AGTACATGCTCTGTCCAGC | 12450 | GCTGGACAGAGCATGTACT |
| 9772 | GTACATGCTCTGTCCAGCT | 12451 | AGCTGGACAGAGCATGTAC |
| 9773 | TACATGCTCTGTCCAGCTT | 12452 | AAGCTGGACAGAGCATGTA |
| 9774 | ACATGCTCTGTCCAGCTTT | 12453 | AAAGCTGGACAGAGCATGT |
| 9775 | CATGCTCTGTCCAGCTTTC | 12454 | GAAAGCTGGACAGAGCATG |
| 9776 | ATGCTCTGTCCAGCTTTCC | 12455 | GGAAAGCTGGACAGAGCAT |
| 9777 | TGCTCTGTCCAGCTTTCCC | 12456 | GGGAAAGCTGGACAGAGCA |
| 9778 | GCTCTGTCCAGCTTTCCCC | 12457 | GGGGAAAGCTGGACAGAGC |
| 9779 | CTCTGTCCAGCTTTCCCCA | 12458 | TGGGGAAAGCTGGACAGAG |
| 9780 | TCTGTCCAGCTTTCCCCAG | 12459 | CTGGGGAAAGCTGGACAGA |
| 9781 | CTGTCCAGCTTTCCCCAGG | 12460 | CCTGGGGAAAGCTGGACAG |
| 9782 | TGTCCAGCTTTCCCCAGGG | 12461 | CCCTGGGGAAAGCTGGACA |
| 9783 | GTCCAGCTTTCCCCAGGGT | 12462 | ACCCTGGGGAAAGCTGGAC |
| 9784 | TCCAGCTTTCCCGAGGGTG | 12463 | CACCCTGGGGAAAGCTGGA |
| 9785 | CCAGCTTTCCCCAGGGTGA | 12464 | TCACCCTGGGGAAAGCTGG |
| 9786 | CAGCTTTCCCCAGGGTGAC | 12465 | GTCACCCTGGGGAAAGCTG |
| 9787 | AGCTTTCCGCAGGGTGACA | 12466 | TGTCACCCTGGGGAAAGCT |
| 9788 | GCTTTCCCCAGGGTGACAT | 12467 | ATGTCACCCTGGGGAAAGC |
| 9789 | CTTTCCCCAGGGTGACATA | 12468 | TATGTCACCCTGGGGAAAG |
| 9790 | TTTCCCCAGGGTGACATAC | 12469 | GTATGTCACCCTGGGGAAA |
| 9791 | TTCCCCAGGGTGACATACA | 12470 | TGTATGTCACCCTGGGGAA |
| 9792 | TCCCCAGGGTGACATACAG | 12471 | CTGTATGTCACCCTGGGGA |
| 9793 | CCCCAGGGTGACATACAGA | 12472 | TCTGTATGTCACCCTGGGG |
| 9794 | CCCAGGGTGACATACAGAA | 12473 | TTCTGTATGTCACCCTGGG |
| 9795 | CCAGGGTGACATACAGAAG | 12474 | CTTCTGTATGTCACCCTGG |
| 9796 | CAGGGTGACATACAGAAGG | 12475 | CCTTCTGTATGTCACCCTG |
| 9797 | AGGGTGACATACAGAAGGG | 12476 | CCCTTCTGTATGTCACCCT |
| 9798 | GGGTGACATACAGAAGGGG | 12477 | CCCCTTCTGTATGTCACCC |
| 9799 | GGTGACATACAGAAGGGGC | 12478 | GCCCCTTCTGTATGTCACC |
| 9800 | GTGACATACAGAAGGGGCA | 12479 | TGCCCCTTCTGTATGTCAC |
| 9801 | TGACATACAGAACGGGCAA | 12480 | TTGCCCCTTCTGTATGTCA |

The application's sequence listing, which the Patent Office published only in electronic form, follows.

SEQUENCE LISTING (12518 sequences)

SEQ ID NO: 1 - DNA, 19 bp, Homo sapiens
caccacagttatcacccat

SEQ ID NO: 2 - DNA, 19 bp, Homo sapiens
accacagttatcacccatg

SEQ ID NO: 3 - DNA, 19 bp, Homo sapiens
ccacagttatcacccatgc

SEQ ID NO: 4 - DNA, 19 bp, Homo sapiens
cacagttatcacccatgcc

SEQ ID NO: 5 - DNA, 19 bp, Homo sapiens
acagttatcacccatgccc

SEQ ID NO: 6 - DNA, 19 bp, Homo sapiens
cagttatcacccatgccct

SEQ ID NO: 7 - DNA, 19 bp, Homo sapiens
agttatcacccatgccctc

SEQ ID NO: 8 - DNA, 19 bp, Homo sapiens
gttatcacccatgccctcc

SEQ ID NO: 9 - DNA, 19 bp, Homo sapiens
ttatcacccatgccctcct

SEQ ID NO: 10 - DNA, 19 bp, Homo sapiens
tatcacccatgccctccta

SEQ ID NO: 11 - DNA, 19 bp, Homo sapiens
atcacccatgccctcctaa

SEQ ID NO: 12 - DNA, 19 bp, Homo sapiens
tcacccatgccctcctaaa

SEQ ID NO: 13 - DNA, 19 bp, Homo sapiens
cacccatgccctcctaaaa

SEQ ID NO: 14 - DNA, 19 bp, Homo sapiens
acccatgccctcctaaaag

SEQ ID NO: 15 - DNA, 19 bp, Homo sapiens
cccatgccctcctaaaagg

SEQ ID NO: 16 - DNA, 19 bp, Homo sapiens
ccatgccctcctaaaaggg

SEQ ID NO: 17 - DNA, 19 bp, Homo sapiens
catgccctcctaaaagggt

SEQ ID NO: 18 - DNA, 19 bp, Homo sapiens
atgccctcctaaaagggtg

SEQ ID NO: 19 - DNA, 19 bp, Homo sapiens
tgccctcctaaaagggtgt

SEQ ID NO: 20 - DNA, 19 bp, Homo sapiens
gccctcctaaaagggtgtc

SEQ ID NO: 21 - DNA, 19 bp, Homo sapiens
ccctcctaaaagggtgtct

SEQ ID NO: 22 - DNA, 19 bp, Homo sapiens
cctcctaaaagggtgtctc

SEQ ID NO: 23 - DNA, 19 bp, Homo sapiens
ctcctaaaagggtgtctca

SEQ ID NO: 24 - DNA, 19 bp, Homo sapiens
tcctaaaagggtgtctcaa

SEQ ID NO: 25 - DNA, 19 bp, Homo sapiens
cctaaaagggtgtctcaaa

SEQ ID NO: 26 - DNA, 19 bp, Homo sapiens
ctaaaagggtgtctcaaag

SEQ ID NO: 27 - DNA, 19 bp, Homo sapiens
taaaagggtgtctcaaagc

SEQ ID NO: 28 - DNA, 19 bp, Homo sapiens
aaaagggtgtctcaaagca

SEQ ID NO: 29 - DNA, 19 bp, Homo sapiens
aaagggtgtctcaaagcat

SEQ ID NO: 30 - DNA, 19 bp, Homo sapiens
aagggtgtctcaaagcata

SEQ ID NO: 31 - DNA, 19 bp, Homo sapiens
agggtgtctcaaagcatat

SEQ ID NO: 32 - DNA, 19 bp, Homo sapiens
gggtgtctcaaagcatatc

SEQ ID NO: 33 - DNA, 19 bp, Homo sapiens
ggtgtctcaaagcatatct

SEQ ID NO: 34 - DNA, 19 bp, Homo sapiens
gtgtctcaaagcatatctt

SEQ ID NO: 35 - DNA, 19 bp, Homo sapiens
tgtctcaaagcatatcttt

SEQ ID NO: 36 - DNA, 19 bp, Homo sapiens
gtctcaaagcatatctttc

SEQ ID NO: 37 - DNA, 19 bp, Homo sapiens
tctcaaagcatatctttct

SEQ ID NO: 38 - DNA, 19 bp, Homo sapiens
ctcaaagcatatctttctg

SEQ ID NO: 39 - DNA, 19 bp, Homo sapiens
tcaaagcatatctttctgt

SEQ ID NO: 40 - DNA, 19 bp, Homo sapiens
caaagcatatctttctgta

SEQ ID NO: 41 - DNA, 19 bp, Homo sapiens
aaagcatatctttctgtag

SEQ ID NO: 42 - DNA, 19 bp, Homo sapiens
aagcatatctttctgtaga

SEQ ID NO: 43 - DNA, 19 bp, Homo sapiens
agcatatctttctgtagag

SEQ ID NO: 44 - DNA, 19 bp, Homo sapiens
gcatatctttctgtagagc

SEQ ID NO: 45 - DNA, 19 bp, Homo sapiens
catatctttctgtagagca

SEQ ID NO: 46 - DNA, 19 bp, Homo sapiens
atatctttctgtagagcag

SEQ ID NO: 47 - DNA, 19 bp, Homo sapiens
tatctttctgtagagcaga

SEQ ID NO: 48 - DNA, 19 bp, Homo sapiens
atctttctgtagagcagaa

SEQ ID NO: 49 - DNA, 19 bp, Homo sapiens
tctttctgtagagcagaat

SEQ ID NO: 50 - DNA, 19 bp, Homo sapiens
ctttctgtagagcagaatt

SEQ ID NO: 51 - DNA, 19 bp, Homo sapiens
tttctgtagagcagaattc

SEQ ID NO: 52 - DNA, 19 bp, Homo sapiens
ttctgtagagcagaattcg

SEQ ID NO: 53 - DNA, 19 bp, Homo sapiens
tctgtagagcagaattcgg

SEQ ID NO: 54 - DNA, 19 bp, Homo sapiens
ctgtagagcagaattcgga

SEQ ID NO: 55 - DNA, 19 bp, Homo sapiens
tgtagagcagaattcggaa

SEQ ID NO: 56 - DNA, 19 bp, Homo sapiens
gtagagcagaattcggaac

SEQ ID NO: 57 - DNA, 19 bp, Homo sapiens
tagagcagaattcggaact

SEQ ID NO: 58 - DNA, 19 bp, Homo sapiens
agagcagaattcggaactg

SEQ ID NO: 59 - DNA, 19 bp, Homo sapiens
gagcagaattcggaactga

SEQ ID NO: 60 - DNA, 19 bp, Homo sapiens
agcagaattcggaactgag

SEQ ID NO: 61 - DNA, 19 bp, Homo sapiens
gcagaattcggaactgaga

SEQ ID NO: 62 - DNA, 19 bp, Homo sapiens
cagaattcggaactgagaa

SEQ ID NO: 63 - DNA, 19 bp, Homo sapiens
agaattcggaactgagaag

SEQ ID NO: 64 - DNA, 19 bp, Homo sapiens
gaattcggaactgagaaga

SEQ ID NO: 65 - DNA, 19 bp, Homo sapiens
aattcggaactgagaagac

SEQ ID NO: 66 - DNA, 19 bp, Homo sapiens
attcggaactgagaagacg

SEQ ID NO: 67 - DNA, 19 bp, Homo sapiens
ttcggaactgagaagacga

SEQ ID NO: 68 - DNA, 19 bp, Homo sapiens
tcggaactgagaagacgag

SEQ ID NO: 69 - DNA, 19 bp, Homo sapiens
cggaactgagaagacgagg

SEQ ID NO: 70 - DNA, 19 bp, Homo sapiens
ggaactgagaagacgaggg

SEQ ID NO: 71 - DNA, 19 bp, Homo sapiens
gaactgagaagacgagggc

SEQ ID NO: 72 - DNA, 19 bp, Homo sapiens
aactgagaagacgagggct

SEQ ID NO: 73 - DNA, 19 bp, Homo sapiens
actgagaagacgagggctc

SEQ ID NO: 74 - DNA, 19 bp, Homo sapiens
ctgagaagacgagggctca

SEQ ID NO: 75 - DNA, 19 bp, Homo sapiens
tgagaagacgagggctcaa

SEQ ID NO: 76 - DNA, 19 bp, Homo sapiens
gagaagacgagggctcaaa

SEQ ID NO: 77 - DNA, 19 bp, Homo sapiens
agaagacgagggctcaaat

SEQ ID NO: 78 - DNA, 19 bp, Homo sapiens
gaagacgagggctcaaatt

SEQ ID NO: 79 - DNA, 19 bp, Homo sapiens
aagacgagggctcaaattg

SEQ ID NO: 80 - DNA, 19 bp, Homo sapiens
agacgagggctcaaattga

SEQ ID NO: 81 - DNA, 19 bp, Homo sapiens
gacgagggctcaaattgaa

SEQ ID NO: 82 - DNA, 19 bp, Homo sapiens
acgagggctcaaattgaat

SEQ ID NO: 83 - DNA, 19 bp, Homo sapiens
cgagggctcaaattgaatc

SEQ ID NO: 84 - DNA, 19 bp, Homo sapiens
gagggctcaaattgaatct

SEQ ID NO: 85 - DNA, 19 bp, Homo sapiens
agggctcaaattgaatctc

SEQ ID NO: 86 - DNA, 19 bp, Homo sapiens
gggctcaaattgaatctca

SEQ ID NO: 87 - DNA, 19 bp, Homo sapiens
ggctcaaattgaatctcac

SEQ ID NO: 88 - DNA, 19 bp, Homo sapiens
gctcaaattgaatctcaca

SEQ ID NO: 89 - DNA, 19 bp, Homo sapiens
ctcaaattgaatctcacag

SEQ ID NO: 90 - DNA, 19 bp, Homo sapiens
tcaaattgaatctcacagg

SEQ ID NO: 91 - DNA, 19 bp, Homo sapiens
caaattgaatctcacagga

SEQ ID NO: 92 - DNA, 19 bp, Homo sapiens
aaattgaatctcacaggat

SEQ ID NO: 93 - DNA, 19 bp, Homo sapiens
aattgaatctcacaggatt

SEQ ID NO: 94 - DNA, 19 bp, Homo sapiens
attgaatctcacaggattt

SEQ ID NO: 95 - DNA, 19 bp, Homo sapiens
ttgaatctcacaggatttg

SEQ ID NO: 96 - DNA, 19 bp, Homo sapiens
tgaatctcacaggatttgc

SEQ ID NO: 97 - DNA, 19 bp, Homo sapiens
gaatctcacaggatttgcg

SEQ ID NO: 98 - DNA, 19 bp, Homo sapiens
aatctcacaggatttgcgt

SEQ ID NO: 99 - DNA, 19 bp, Homo sapiens
atctcacaggatttgcgtg

SEQ ID NO: 100 - DNA, 19 bp, Homo sapiens
tctcacaggatttgcgtgc

SEQ ID NO: 101 - DNA, 19 bp, Homo sapiens
ctcacaggatttgcgtgca

SEQ ID NO: 102 - DNA, 19 bp, Homo sapiens
tcacaggatttgcgtgcaa

SEQ ID NO: 103 - DNA, 19 bp, Homo sapiens
cacaggatttgcgtgcaag

SEQ ID NO: 104 - DNA, 19 bp, Homo sapiens
acaggatttgcgtgcaaga

SEQ ID NO: 105 - DNA, 19 bp, Homo sapiens
caggatttgcgtgcaagag

SEQ ID NO: 106 - DNA, 19 bp, Homo sapiens
aggatttgcgtgcaagaga

SEQ ID NO: 107 - DNA, 19 bp, Homo sapiens
ggatttgcgtgcaagagaa

SEQ ID NO: 108 - DNA, 19 bp, Homo sapiens
gatttgcgtgcaagagaaa

SEQ ID NO: 109 - DNA, 19 bp, Homo sapiens
atttgcgtgcaagagaaac

SEQ ID NO: 110 - DNA, 19 bp, Homo sapiens
tttgcgtgcaagagaaacc

SEQ ID NO: 111 - DNA, 19 bp, Homo sapiens
ttgcgtgcaagagaaaccc

SEQ ID NO: 112 - DNA, 19 bp, Homo sapiens
tgcgtgcaagagaaaccca

SEQ ID NO: 113 - DNA, 19 bp, Homo sapiens
gcgtgcaagagaaacccaa

SEQ ID NO: 114 - DNA, 19 bp, Homo sapiens
cgtgcaagagaaacccaaa

SEQ ID NO: 115 - DNA, 19 bp, Homo sapiens
gtgcaagagaaacccaaag

SEQ ID NO: 116 - DNA, 19 bp, Homo sapiens
tgcaagagaaacccaaagg

SEQ ID NO: 117 - DNA, 19 bp, Homo sapiens
gcaagagaaacccaaagga

SEQ ID NO: 118 - DNA, 19 bp, Homo sapiens
caagagaaacccaaaggaa

SEQ ID NO: 119 - DNA, 19 bp, Homo sapiens
aagagaaacccaaaggaat

SEQ ID NO: 120 - DNA, 19 bp, Homo sapiens
agagaaacccaaaggaatg

SEQ ID NO: 121 - DNA, 19 bp, Homo sapiens
gagaaacccaaaggaatgg

SEQ ID NO: 122 - DNA, 19 bp, Homo sapiens
agaaacccaaaggaatgga

SEQ ID NO: 123 - DNA, 19 bp, Homo sapiens
gaaacccaaaggaatggat

SEQ ID NO: 124 - DNA, 19 bp, Homo sapiens
aaacccaaaggaatggatt

SEQ ID NO: 125 - DNA, 19 bp, Homo sapiens
aacccaaaggaatggattg

SEQ ID NO: 126 - DNA, 19 bp, Homo sapiens
acccaaaggaatggattgg

SEQ ID NO: 127 - DNA, 19 bp, Homo sapiens
cccaaaggaatggattggc

SEQ ID NO: 128 - DNA, 19 bp, Homo sapiens
ccaaaggaatggattggct

SEQ ID NO: 129 - DNA, 19 bp, Homo sapiens
caaaggaatggattggctc

SEQ ID NO: 130 - DNA, 19 bp, Homo sapiens
aaaggaatggattggctct

SEQ ID NO: 131 - DNA, 19 bp, Homo sapiens
aaggaatggattggctctt

SEQ ID NO: 132 - DNA, 19 bp, Homo sapiens
aggaatggattggctcttc

SEQ ID NO: 133 - DNA, 19 bp, Homo sapiens
ggaatggattggctcttct

SEQ ID NO: 134 - DNA, 19 bp, Homo sapiens
gaatggattggctcttctt

SEQ ID NO: 135 - DNA, 19 bp, Homo sapiens
aatggattggctcttcttc

SEQ ID NO: 136 - DNA, 19 bp, Homo sapiens
atggattggctcttcttca

SEQ ID NO: 137 - DNA, 19 bp, Homo sapiens
tggattggctcttcttcag

SEQ ID NO: 138 - DNA, 19 bp, Homo sapiens
ggattggctcttcttcaga

SEQ ID NO: 139 - DNA, 19 bp, Homo sapiens
gattggctcttcttcagaa

SEQ ID NO: 140 - DNA, 19 bp, Homo sapiens
attggctcttcttcagaaa

SEQ ID NO: 141 - DNA, 19 bp, Homo sapiens
ttggctcttcttcagaaac

SEQ ID NO: 142 - DNA, 19 bp, Homo sapiens
tggctcttcttcagaaaca

SEQ ID NO: 143 - DNA, 19 bp, Homo sapiens
ggctcttcttcagaaacat

SEQ ID NO: 144 - DNA, 19 bp, Homo sapiens
gctcttcttcagaaacatt

SEQ ID NO: 145 - DNA, 19 bp, Homo sapiens
ctcttcttcagaaacattt

SEQ ID NO: 146 - DNA, 19 bp, Homo sapiens
tcttcttcagaaacatttg

SEQ ID NO: 147 - DNA, 19 bp, Homo sapiens
cttcttcagaaacatttgc

SEQ ID NO: 148 - DNA, 19 bp, Homo sapiens
ttcttcagaaacatttgcc

SEQ ID NO: 149 - DNA, 19 bp, Homo sapiens
tcttcagaaacatttgcct

SEQ ID NO: 150 - DNA, 19 bp, Homo sapiens
cttcagaaacatttgcctt

SEQ ID NO: 151 - DNA, 19 bp, Homo sapiens
ttcagaaacatttgccttt

SEQ ID NO: 152 - DNA, 19 bp, Homo sapiens
tcagaaacatttgcctttt

SEQ ID NO: 153 - DNA, 19 bp, Homo sapiens
cagaaacatttgccttttg

SEQ ID NO: 154 - DNA, 19 bp, Homo sapiens
agaaacatttgccttttga

SEQ ID NO: 155 - DNA, 19 bp, Homo sapiens
gaaacatttgccttttgat

SEQ ID NO: 156 - DNA, 19 bp, Homo sapiens
aaacatttgccttttgatc

SEQ ID NO: 157 - DNA, 19 bp, Homo sapiens
aacatttgccttttgatca

SEQ ID NO: 158 - DNA, 19 bp, Homo sapiens
acatttgccttttgatcat

SEQ ID NO: 159 - DNA, 19 bp, Homo sapiens
catttgccttttgatcatt

SEQ ID NO: 160 - DNA, 19 bp, Homo sapiens
atttgccttttgatcattc

SEQ ID NO: 161 - DNA, 19 bp, Homo sapiens
tttgccttttgatcattct

SEQ ID NO: 162 - DNA, 19 bp, Homo sapiens
ttgccttttgatcattcta

SEQ ID NO: 163 - DNA, 19 bp, Homo sapiens
tgccttttgatcattctaa

SEQ ID NO: 164 - DNA, 19 bp, Homo sapiens
gccttttgatcattctaat

SEQ ID NO: 165 - DNA, 19 bp, Homo sapiens
ccttttgatcattctaatg

SEQ ID NO: 166 - DNA, 19 bp, Homo sapiens
cttttgatcattctaatgg

SEQ ID NO: 167 - DNA, 19 bp, Homo sapiens
ttttgatcattctaatggt

SEQ ID NO: 168 - DNA, 19 bp, Homo sapiens
tttgatcattctaatggtg

SEQ ID NO: 169 - DNA, 19 bp, Homo sapiens
ttgatcattctaatggtgg

SEQ ID NO: 170 - DNA, 19 bp, Homo sapiens
tgatcattctaatggtggt

SEQ ID NO: 171 - DNA, 19 bp, Homo sapiens
gatcattctaatggtggtg

SEQ ID NO: 172 - DNA, 19 bp, Homo sapiens
atcattctaatggtggtga

SEQ ID NO: 173 - DNA, 19 bp, Homo sapiens
tcattctaatggtggtgat

SEQ ID NO: 174 - DNA, 19 bp, Homo sapiens
cattctaatggtggtgatg

SEQ ID NO: 175 - DNA, 19 bp, Homo sapiens
attctaatggtggtgatgg

SEQ ID NO: 176 - DNA, 19 bp, Homo sapiens
ttctaatggtggtgatgga

SEQ ID NO: 177 - DNA, 19 bp, Homo sapiens
tctaatggtggtgatggaa

SEQ ID NO: 178 - DNA, 19 bp, Homo sapiens
ctaatggtggtgatggaag

SEQ ID NO: 179 - DNA, 19 bp, Homo sapiens
taatggtggtgatggaagt

SEQ ID NO: 180 - DNA, 19 bp, Homo sapiens
aatggtggtgatggaagta

SEQ ID NO: 181 - DNA, 19 bp, Homo sapiens
atggtggtgatggaagtaa

SEQ ID NO: 182 - DNA, 19 bp, Homo sapiens
tggtggtgatggaagtaaa

SEQ ID NO: 183 - DNA, 19 bp, Homo sapiens
ggtggtgatggaagtaaac

SEQ ID NO: 184 - DNA, 19 bp, Homo sapiens
gtggtgatggaagtaaaca

SEQ ID NO: 185 - DNA, 19 bp, Homo sapiens
tggtgatggaagtaaacag

SEQ ID NO: 186 - DNA, 19 bp, Homo sapiens
ggtgatggaagtaaacagt

SEQ ID NO: 187 - DNA, 19 bp, Homo sapiens
gtgatggaagtaaacagtg

SEQ ID NO: 188 - DNA, 19 bp, Homo sapiens
tgatggaagtaaacagtga

SEQ ID NO: 189 - DNA, 19 bp, Homo sapiens
gatggaagtaaacagtgaa

SEQ ID NO: 190 - DNA, 19 bp, Homo sapiens
atggaagtaaacagtgaat

SEQ ID NO: 191 - DNA, 19 bp, Homo sapiens
tggaagtaaacagtgaatt

SEQ ID NO: 192 - DNA, 19 bp, Homo sapiens
ggaagtaaacagtgaattt

SEQ ID NO: 193 - DNA, 19 bp, Homo sapiens
gaagtaaacagtgaattta

SEQ ID NO: 194 - DNA, 19 bp, Homo sapiens
aagtaaacagtgaatttat

SEQ ID NO: 195 - DNA, 19 bp, Homo sapiens
agtaaacagtgaatttatt

SEQ ID NO: 196 - DNA, 19 bp, Homo sapiens
gtaaacagtgaatttattg

SEQ ID NO: 197 - DNA, 19 bp, Homo sapiens
taaacagtgaatttattgt

SEQ ID NO: 198 - DNA, 19 bp, Homo sapiens
aaacagtgaatttattgtt

SEQ ID NO: 199 - DNA, 19 bp, Homo sapiens
aacagtgaatttattgttg

SEQ ID NO: 200 - DNA, 19 bp, Homo sapiens
acagtgaatttattgttga

SEQ ID NO: 201 - DNA, 19 bp, Homo sapiens
cagtgaatttattgttgag

SEQ ID NO: 202 - DNA, 19 bp, Homo sapiens
agtgaatttattgttgagg

SEQ ID NO: 203 - DNA, 19 bp, Homo sapiens
gtgaatttattgttgaggt

SEQ ID NO: 204 - DNA, 19 bp, Homo sapiens
tgaatttattgttgaggtg

SEQ ID NO: 205 - DNA, 19 bp, Homo sapiens
gaatttattgttgaggtga

SEQ ID NO: 206 - DNA, 19 bp, Homo sapiens
aatttattgttgaggtgaa

SEQ ID NO: 207 - DNA, 19 bp, Homo sapiens
atttattgttgaggtgaag

SEQ ID NO: 208 - DNA, 19 bp, Homo sapiens
tttattgttgaggtgaagg

SEQ ID NO: 209 - DNA, 19 bp, Homo sapiens
ttattgttgaggtgaagga

SEQ ID NO: 210 - DNA, 19 bp, Homo sapiens
tattgttgaggtgaaggaa

SEQ ID NO: 211 - DNA, 19 bp, Homo sapiens
attgttgaggtgaaggaat

SEQ ID NO: 212 - DNA, 19 bp, Homo sapiens
ttgttgaggtgaaggaatt

SEQ ID NO: 213 - DNA, 19 bp, Homo sapiens
tgttgaggtgaaggaattt

SEQ ID NO: 214 - DNA, 19 bp, Homo sapiens
gttgaggtgaaggaatttg

SEQ ID NO: 215 - DNA, 19 bp, Homo sapiens
ttgaggtgaaggaatttga

SEQ ID NO: 216 - DNA, 19 bp, Homo sapiens
tgaggtgaaggaatttgac

SEQ ID NO: 217 - DNA, 19 bp, Homo sapiens
gaggtgaaggaatttgaca

SEQ ID NO: 218 - DNA, 19 bp, Homo sapiens
aggtgaaggaatttgacat

SEQ ID NO: 219 - DNA, 19 bp, Homo sapiens
ggtgaaggaatttgacatt

SEQ ID NO: 220 - DNA, 19 bp, Homo sapiens
gtgaaggaatttgacattg

SEQ ID NO: 221 - DNA, 19 bp, Homo sapiens
tgaaggaatttgacattga

SEQ ID NO: 222 - DNA, 19 bp, Homo sapiens
gaaggaatttgacattgaa

SEQ ID NO: 223 - DNA, 19 bp, Homo sapiens
aaggaatttgacattgaaa

SEQ ID NO: 224 - DNA, 19 bp, Homo sapiens
aggaatttgacattgaaaa

SEQ ID NO: 225 - DNA, 19 bp, Homo sapiens
ggaatttgacattgaaaat

SEQ ID NO: 226 - DNA, 19 bp, Homo sapiens
gaatttgacattgaaaatg

SEQ ID NO: 227 - DNA, 19 bp, Homo sapiens
aatttgacattgaaaatgg

SEQ ID NO: 228 - DNA, 19 bp, Homo sapiens
atttgacattgaaaatggc

SEQ ID NO: 229 - DNA, 19 bp, Homo sapiens
tttgacattgaaaatggca

SEQ ID NO: 230 - DNA, 19 bp, Homo sapiens
ttgacattgaaaatggcac

SEQ ID NO: 231 - DNA, 19 bp, Homo sapiens
tgacattgaaaatggcact

SEQ ID NO: 232 - DNA, 19 bp, Homo sapiens
gacattgaaaatggcacta

SEQ ID NO: 233 - DNA, 19 bp, Homo sapiens
acattgaaaatggcactac

SEQ ID NO: 234 - DNA, 19 bp, Homo sapiens
cattgaaaatggcactaca

SEQ ID NO: 235 - DNA, 19 bp, Homo sapiens
attgaaaatggcactacaa

SEQ ID NO: 236 - DNA, 19 bp, Homo sapiens
ttgaaaatggcactacaaa

SEQ ID NO: 237 - DNA, 19 bp, Homo sapiens
tgaaaatggcactacaaaa

SEQ ID NO: 238 - DNA, 19 bp, Homo sapiens
gaaaatggcactacaaaat

SEQ ID NO: 239 - DNA, 19 bp, Homo sapiens
aaaatggcactacaaaatg

SEQ ID NO: 240 - DNA, 19 bp, Homo sapiens
aaatggcactacaaaatgg

SEQ ID NO: 241 - DNA, 19 bp, Homo sapiens
aatggcactacaaaatggc

SEQ ID NO: 242 - DNA, 19 bp, Homo sapiens
atggcactacaaaatggca

SEQ ID NO: 243 - DNA, 19 bp, Homo sapiens
tggcactacaaaatggcaa

SEQ ID NO: 244 - DNA, 19 bp, Homo sapiens
ggcactacaaaatggcaaa

SEQ ID NO: 245 - DNA, 19 bp, Homo sapiens
gcactacaaaatggcaaac

SEQ ID NO: 246 - DNA, 19 bp, Homo sapiens
cactacaaaatggcaaaca

SEQ ID NO: 247 - DNA, 19 bp, Homo sapiens
actacaaaatggcaaacag

SEQ ID NO: 248 - DNA, 19 bp, Homo sapiens
ctacaaaatggcaaacagt

SEQ ID NO: 249 - DNA, 19 bp, Homo sapiens
tacaaaatggcaaacagtc

SEQ ID NO: 250 - DNA, 19 bp, Homo sapiens
acaaaatggcaaacagtca

SEQ ID NO: 251 - DNA, 19 bp, Homo sapiens
caaaatggcaaacagtcag

SEQ ID NO: 252 - DNA, 19 bp, Homo sapiens
aaaatggcaaacagtcaga

SEQ ID NO: 253 - DNA, 19 bp, Homo sapiens
aaatggcaaacagtcagaa

SEQ ID NO: 254 - DNA, 19 bp, Homo sapiens
aatggcaaacagtcagaag

SEQ ID NO: 255 - DNA, 19 bp, Homo sapiens
atggcaaacagtcagaaga

SEQ ID NO: 256 - DNA, 19 bp, Homo sapiens
tggcaaacagtcagaagac

SEQ ID NO: 257 - DNA, 19 bp, Homo sapiens
ggcaaacagtcagaagaca

SEQ ID NO: 258 - DNA, 19 bp, Homo sapiens
gcaaacagtcagaagacaa

SEQ ID NO: 259 - DNA, 19 bp, Homo sapiens
caaacagtcagaagacaaa

SEQ ID NO: 260 - DNA, 19 bp, Homo sapiens
aaacagtcagaagacaaaa

SEQ ID NO: 261 - DNA, 19 bp, Homo sapiens
aacagtcagaagacaaaag

SEQ ID NO: 262 - DNA, 19 bp, Homo sapiens
acagtcagaagacaaaagc

SEQ ID NO: 263 - DNA, 19 bp, Homo sapiens
cagtcagaagacaaaagcg

SEQ ID NO: 264 - DNA, 19 bp, Homo sapiens
agtcagaagacaaaagcgg

SEQ ID NO: 265 - DNA, 19 bp, Homo sapiens
gtcagaagacaaaagcggg

SEQ ID NO: 266 - DNA, 19 bp, Homo sapiens
tcagaagacaaaagcggga

SEQ ID NO: 267 - DNA, 19 bp, Homo sapiens
cagaagacaaaagcgggag

SEQ ID NO: 268 - DNA, 19 bp, Homo sapiens
agaagacaaaagcgggagt

SEQ ID NO: 269 - DNA, 19 bp, Homo sapiens
gaagacaaaagcgggagtg

SEQ ID NO: 270 - DNA, 19 bp, Homo sapiens
aagacaaaagcgggagtgg

SEQ ID NO: 271 - DNA, 19 bp, Homo sapiens
agacaaaagcgggagtgga

SEQ ID NO: 272 - DNA, 19 bp, Homo sapiens
gacaaaagcgggagtggat

SEQ ID NO: 273 - DNA, 19 bp, Homo sapiens
acaaaagcgggagtggatc

SEQ ID NO: 274 - DNA, 19 bp, Homo sapiens
caaaagcgggagtggatca

SEQ ID NO: 275 - DNA, 19 bp, Homo sapiens
aaaagcgggagtggatcaa

SEQ ID NO: 276 - DNA, 19 bp, Homo sapiens
aaagcgggagtggatcaag

SEQ ID NO: 277 - DNA, 19 bp, Homo sapiens
aagcgggagtggatcaagt

SEQ ID NO: 278 - DNA, 19 bp, Homo sapiens
agcgggagtggatcaagtt

SEQ ID NO: 279 - DNA, 19 bp, Homo sapiens
gcgggagtggatcaagttt

SEQ ID NO: 280 - DNA, 19 bp, Homo sapiens
cgggagtggatcaagtttg

SEQ ID NO: 281 - DNA, 19 bp, Homo sapiens
gggagtggatcaagtttgc

SEQ ID NO: 282 - DNA, 19 bp, Homo sapiens
ggagtggatcaagtttgcc

SEQ ID NO: 283 - DNA, 19 bp, Homo sapiens
gagtggatcaagtttgccg

SEQ ID NO: 284 - DNA, 19 bp, Homo sapiens
agtggatcaagtttgccgc

SEQ ID NO: 285 - DNA, 19 bp, Homo sapiens
gtggatcaagtttgccgca

SEQ ID NO: 286 - DNA, 19 bp, Homo sapiens
tggatcaagtttgccgcag

SEQ ID NO: 287 - DNA, 19 bp, Homo sapiens
ggatcaagtttgccgcagc

SEQ ID NO: 288 - DNA, 19 bp, Homo sapiens
gatcaagtttgccgcagcc

SEQ ID NO: 289 - DNA, 19 bp, Homo sapiens
atcaagtttgccgcagcct

SEQ ID NO: 290 - DNA, 19 bp, Homo sapiens
tcaagtttgccgcagcctg

SEQ ID NO: 291 - DNA, 19 bp, Homo sapiens
caagtttgccgcagcctgt

SEQ ID NO: 292 - DNA, 19 bp, Homo sapiens
aagtttgccgcagcctgtc

SEQ ID NO: 293 - DNA, 19 bp, Homo sapiens
agtttgccgcagcctgtcg

SEQ ID NO: 294 - DNA, 19 bp, Homo sapiens
gtttgccgcagcctgtcga

SEQ ID NO: 295 - DNA, 19 bp, Homo sapiens
tttgccgcagcctgtcgag

SEQ ID NO: 296 - DNA, 19 bp, Homo sapiens
ttgccgcagcctgtcgaga

SEQ ID NO: 297 - DNA, 19 bp, Homo sapiens
tgccgcagcctgtcgagaa

SEQ ID NO: 298 - DNA, 19 bp, Homo sapiens
gccgcagcctgtcgagaag

SEQ ID NO: 299 - DNA, 19 bp, Homo sapiens
ccgcagcctgtcgagaagg

SEQ ID NO: 300 - DNA, 19 bp, Homo sapiens
cgcagcctgtcgagaagga

SEQ ID NO: 301 - DNA, 19 bp, Homo sapiens
gcagcctgtcgagaaggag

SEQ ID NO: 302 - DNA, 19 bp, Homo sapiens
cagcctgtcgagaaggaga

SEQ ID NO: 303 - DNA, 19 bp, Homo sapiens
agcctgtcgagaaggagag

SEQ ID NO: 304 - DNA, 19 bp, Homo sapiens
gcctgtcgagaaggagagg

SEQ ID NO: 305 - DNA, 19 bp, Homo sapiens
cctgtcgagaaggagagga

SEQ ID NO: 306 - DNA, 19 bp, Homo sapiens
ctgtcgagaaggagaggac

SEQ ID NO: 307 - DNA, 19 bp, Homo sapiens
tgtcgagaaggagaggaca

SEQ ID NO: 308 - DNA, 19 bp, Homo sapiens
gtcgagaaggagaggacaa

SEQ ID NO: 309 - DNA, 19 bp, Homo sapiens
tcgagaaggagaggacaac

SEQ ID NO: 310 - DNA, 19 bp, Homo sapiens
cgagaaggagaggacaact

SEQ ID NO: 311 - DNA, 19 bp, Homo sapiens
gagaaggagaggacaactc

SEQ ID NO: 312 - DNA, 19 bp, Homo sapiens
agaaggagaggacaactcg

SEQ ID NO: 313 - DNA, 19 bp, Homo sapiens
gaaggagaggacaactcga

SEQ ID NO: 314 - DNA, 19 bp, Homo sapiens
aaggagaggacaactcgaa

SEQ ID NO: 315 - DNA, 19 bp, Homo sapiens
aggagaggacaactcgaag

SEQ ID NO: 316 - DNA, 19 bp, Homo sapiens
ggagaggacaactcgaaga

SEQ ID NO: 317 - DNA, 19 bp, Homo sapiens
gagaggacaactcgaagag

SEQ ID NO: 318 - DNA, 19 bp, Homo sapiens
agaggacaactcgaagagg

SEQ ID NO: 319 - DNA, 19 bp, Homo sapiens
gaggacaactcgaagagga

SEQ ID NO: 320 - DNA, 19 bp, Homo sapiens
aggacaactcgaagaggaa

SEQ ID NO: 321 - DNA, 19 bp, Homo sapiens
ggacaactcgaagaggaac

SEQ ID NO: 322 - DNA, 19 bp, Homo sapiens
gacaactcgaagaggaacc

SEQ ID NO: 323 - DNA, 19 bp, Homo sapiens
acaactcgaagaggaaccc

SEQ ID NO: 324 - DNA, 19 bp, Homo sapiens
caactcgaagaggaacccc

SEQ ID NO: 325 - DNA, 19 bp, Homo sapiens
aactcgaagaggaacccca

SEQ ID NO: 326 - DNA, 19 bp, Homo sapiens
actcgaagaggaaccccat

SEQ ID NO: 327 - DNA, 19 bp, Homo sapiens
ctcgaagaggaaccccatt

SEQ ID NO: 328 - DNA, 19 bp, Homo sapiens
tcgaagaggaaccccattg

SEQ ID NO: 329 - DNA, 19 bp, Homo sapiens
cgaagaggaaccccattgc

SEQ ID NO: 330 - DNA, 19 bp, Homo sapiens
gaagaggaaccccattgcc

SEQ ID NO: 331 - DNA, 19 bp, Homo sapiens
aagaggaaccccattgcca

SEQ ID NO: 332 - DNA, 19 bp, Homo sapiens
agaggaaccccattgccaa

SEQ ID NO: 333 - DNA, 19 bp, Homo sapiens
gaggaaccccattgccaaa

SEQ ID NO: 334 - DNA, 19 bp, Homo sapiens
aggaaccccattgccaaaa

SEQ ID NO: 335 - DNA, 19 bp, Homo sapiens
ggaaccccattgccaaaat

SEQ ID NO: 336 - DNA, 19 bp, Homo sapiens
gaaccccattgccaaaatt

SEQ ID NO: 337 - DNA, 19 bp, Homo sapiens
aaccccattgccaaaattc

SEQ ID NO: 338 - DNA, 19 bp, Homo sapiens
accccattgccaaaattcg

SEQ ID NO: 339 - DNA, 19 bp, Homo sapiens
ccccattgccaaaattcga

SEQ ID NO: 340 - DNA, 19 bp, Homo sapiens
cccattgccaaaattcgat

SEQ ID NO: 341 - DNA, 19 bp, Homo sapiens
ccattgccaaaattcgatc

SEQ ID NO: 342 - DNA, 19 bp, Homo sapiens
cattgccaaaattcgatca

SEQ ID NO: 343 - DNA, 19 bp, Homo sapiens
attgccaaaattcgatcag

SEQ ID NO: 344 - DNA, 19 bp, Homo sapiens
ttgccaaaattcgatcaga

SEQ ID NO: 345 - DNA, 19 bp, Homo sapiens
tgccaaaattcgatcagac

SEQ ID NO: 346 - DNA, 19 bp, Homo sapiens
gccaaaattcgatcagact

SEQ ID NO: 347 - DNA, 19 bp, Homo sapiens
ccaaaattcgatcagactg

SEQ ID NO: 348 - DNA, 19 bp, Homo sapiens
caaaattcgatcagactgc

SEQ ID NO: 349 - DNA, 19 bp, Homo sapiens
aaaattcgatcagactgcg

SEQ ID NO: 350 - DNA, 19 bp, Homo sapiens
aaattcgatcagactgcga

SEQ ID NO: 351 - DNA, 19 bp, Homo sapiens
aattcgatcagactgcgaa

SEQ ID NO: 352 - DNA, 19 bp, Homo sapiens
attcgatcagactgcgaat

SEQ ID NO: 353 - DNA, 19 bp, Homo sapiens
ttcgatcagactgcgaatc

SEQ ID NO: 354 - DNA, 19 bp, Homo sapiens
tcgatcagactgcgaatcg

SEQ ID NO: 355 - DNA, 19 bp, Homo sapiens
cgatcagactgcgaatcga

SEQ ID NO: 356 - DNA, 19 bp, Homo sapiens
gatcagactgcgaatcgaa

SEQ ID NO: 357 - DNA, 19 bp, Homo sapiens
atcagactgcgaatcgaac

SEQ ID NO: 358 - DNA, 19 bp, Homo sapiens
tcagactgcgaatcgaacc

SEQ ID NO: 359 - DNA, 19 bp, Homo sapiens
cagactgcgaatcgaacca

SEQ ID NO: 360 - DNA, 19 bp, Homo sapiens
agactgcgaatcgaaccag

SEQ ID NO: 361 - DNA, 19 bp, Homo sapiens
gactgcgaatcgaaccaga

SEQ ID NO: 362 - DNA, 19 bp, Homo sapiens
actgcgaatcgaaccagaa

SEQ ID NO: 363 - DNA, 19 bp, Homo sapiens
ctgcgaatcgaaccagaag

SEQ ID NO: 364 - DNA, 19 bp, Homo sapiens
tgcgaatcgaaccagaaga

SEQ ID NO: 365 - DNA, 19 bp, Homo sapiens
gcgaatcgaaccagaagat

SEQ ID NO: 366 - DNA, 19 bp, Homo sapiens
cgaatcgaaccagaagata

SEQ ID NO: 367 - DNA, 19 bp, Homo sapiens
gaatcgaaccagaagataa

SEQ ID NO: 368 - DNA, 19 bp, Homo sapiens
aatcgaaccagaagataac

SEQ ID NO: 369 - DNA, 19 bp, Homo sapiens
atcgaaccagaagataaca

SEQ ID NO: 370 - DNA, 19 bp, Homo sapiens
tcgaaccagaagataacat

SEQ ID NO: 371 - DNA, 19 bp, Homo sapiens
cgaaccagaagataacata

SEQ ID NO: 372 - DNA, 19 bp, Homo sapiens
gaaccagaagataacatac

SEQ ID NO: 373 - DNA, 19 bp, Homo sapiens
aaccagaagataacatacc

SEQ ID NO: 374 - DNA, 19 bp, Homo sapiens
accagaagataacataccg

SEQ ID NO: 375 - DNA, 19 bp, Homo sapiens
ccagaagataacataccgg

SEQ ID NO: 376 - DNA, 19 bp, Homo sapiens
cagaagataacataccgga

SEQ ID NO: 377 - DNA, 19 bp, Homo sapiens
agaagataacataccggat

SEQ ID NO: 378 - DNA, 19 bp, Homo sapiens
gaagataacataccggatt

SEQ ID NO: 379 - DNA, 19 bp, Homo sapiens
aagataacataccggattt

SEQ ID NO: 380 - DNA, 19 bp, Homo sapiens
agataacataccggatttc

SEQ ID NO: 381 - DNA, 19 bp, Homo sapiens
gataacataccggatttct

SEQ ID NO: 382 - DNA, 19 bp, Homo sapiens
ataacataccggatttctg

SEQ ID NO: 383 - DNA, 19 bp, Homo sapiens
taacataccggatttctgg

SEQ ID NO: 384 - DNA, 19 bp, Homo sapiens
aacataccggatttctgga

SEQ ID NO: 385 - DNA, 19 bp, Homo sapiens
acataccggatttctggag

SEQ ID NO: 386 - DNA, 19 bp, Homo sapiens
cataccggatttctggagt

SEQ ID NO: 387 - DNA, 19 bp, Homo sapiens
ataccggatttctggagta

SEQ ID NO: 388 - DNA, 19 bp, Homo sapiens
taccggatttctggagtag

SEQ ID NO: 389 - DNA, 19 bp, Homo sapiens
accggatttctggagtagg

SEQ ID NO: 390 - DNA, 19 bp, Homo sapiens
ccggatttctggagtaggg

SEQ ID NO: 391 - DNA, 19 bp, Homo sapiens
cggatttctggagtaggga

SEQ ID NO: 392 - DNA, 19 bp, Homo sapiens
ggatttctggagtagggat

SEQ ID NO: 393 - DNA, 19 bp, Homo sapiens
gatttctggagtagggatt

SEQ ID NO: 394 - DNA, 19 bp, Homo sapiens
atttctggagtagggattg

SEQ ID NO: 395 - DNA, 19 bp, Homo sapiens
tttctggagtagggattga

SEQ ID NO: 396 - DNA, 19 bp, Homo sapiens
ttctggagtagggattgat

SEQ ID NO: 397 - DNA, 19 bp, Homo sapiens
tctggagtagggattgatc

SEQ ID NO: 398 - DNA, 19 bp, Homo sapiens
ctggagtagggattgatcg

SEQ ID NO: 399 - DNA, 19 bp, Homo sapiens
tggagtagggattgatcga

SEQ ID NO: 400 - DNA, 19 bp, Homo sapiens
ggagtagggattgatcgac

SEQ ID NO: 401 - DNA, 19 bp, Homo sapiens
gagtagggattgatcgacc

SEQ ID NO: 402 - DNA, 19 bp, Homo sapiens
agtagggattgatcgacca

SEQ ID NO: 403 - DNA, 19 bp, Homo sapiens
gtagggattgatcgaccac

SEQ ID NO: 404 - DNA, 19 bp, Homo sapiens
tagggattgatcgaccacc

SEQ ID NO: 405 - DNA, 19 bp, Homo sapiens
agggattgatcgaccacca

SEQ ID NO: 406 - DNA, 19 bp, Homo sapiens
gggattgatcgaccaccat

SEQ ID NO: 407 - DNA, 19 bp, Homo sapiens
ggattgatcgaccaccata

SEQ ID NO: 408 - DNA, 19 bp, Homo sapiens
gattgatcgaccaccatat

SEQ ID NO: 409 - DNA, 19 bp, Homo sapiens
attgatcgaccaccatatg

SEQ ID NO: 410 - DNA, 19 bp, Homo sapiens
ttgatcgaccaccatatgg

SEQ ID NO: 411 - DNA, 19 bp, Homo sapiens
tgatcgaccaccatatggg

SEQ ID NO: 412 - DNA, 19 bp, Homo sapiens
gatcgaccaccatatgggg

SEQ ID NO: 413 - DNA, 19 bp, Homo sapiens
atcgaccaccatatggggt

SEQ ID NO: 414 - DNA, 19 bp, Homo sapiens
tcgaccaccatatggggta

SEQ ID NO: 415 - DNA, 19 bp, Homo sapiens
cgaccaccatatggggtat

SEQ ID NO: 416 - DNA, 19 bp, Homo sapiens
gaccaccatatggggtatt

SEQ ID NO: 417 - DNA, 19 bp, Homo sapiens
accaccatatggggtattc

SEQ ID NO: 418 - DNA, 19 bp, Homo sapiens
ccaccatatggggtattca

SEQ ID NO: 419 - DNA, 19 bp, Homo sapiens
caccatatggggtattcac

SEQ ID NO: 420 - DNA, 19 bp, Homo sapiens
accatatggggtattcacc

SEQ ID NO: 421 - DNA, 19 bp, Homo sapiens
ccatatggggtattcacca

SEQ ID NO: 422 - DNA, 19 bp, Homo sapiens
catatggggtattcaccat

SEQ ID NO: 423 - DNA, 19 bp, Homo sapiens
atatggggtattcaccatt

SEQ ID NO: 424 - DNA, 19 bp, Homo sapiens
tatggggtattcaccatta

SEQ ID NO: 425 - DNA, 19 bp, Homo sapiens
atggggtattcaccattaa

SEQ ID NO: 426 - DNA, 19 bp, Homo sapiens
tggggtattcaccattaat

SEQ ID NO: 427 - DNA, 19 bp, Homo sapiens
ggggtattcaccattaatc

SEQ ID NO: 428 - DNA, 19 bp, Homo sapiens
gggtattcaccattaatcc

SEQ ID NO: 429 - DNA, 19 bp, Homo sapiens
ggtattcaccattaatcct

SEQ ID NO: 430 - DNA, 19 bp, Homo sapiens
gtattcaccattaatcctc

SEQ ID NO: 431 - DNA, 19 bp, Homo sapiens
tattcaccattaatcctcg

SEQ ID NO: 432 - DNA, 19 bp, Homo sapiens
attcaccattaatcctcgc

SEQ ID NO: 433 - DNA, 19 bp, Homo sapiens
ttcaccattaatcctcgca

SEQ ID NO: 434 - DNA, 19 bp, Homo sapiens
tcaccattaatcctcgcac

SEQ ID NO: 435 - DNA, 19 bp, Homo sapiens
caccattaatcctcgcact

SEQ ID NO: 436 - DNA, 19 bp, Homo sapiens
accattaatcctcgcactg

SEQ ID NO: 437 - DNA, 19 bp, Homo sapiens
ccattaatcctcgcactgg

SEQ ID NO: 438 - DNA, 19 bp, Homo sapiens
cattaatcctcgcactggg

SEQ ID NO: 439 - DNA, 19 bp, Homo sapiens
attaatcctcgcactgggg

SEQ ID NO: 440 - DNA, 19 bp, Homo sapiens
ttaatcctcgcactgggga

SEQ ID NO: 441 - DNA, 19 bp, Homo sapiens
taatcctcgcactggggaa

SEQ ID NO: 442 - DNA, 19 bp, Homo sapiens
aatcctcgcactggggaaa

SEQ ID NO: 443 - DNA, 19 bp, Homo sapiens
atcctcgcactggggaaat

SEQ ID NO: 444 - DNA, 19 bp, Homo sapiens
tcctcgcactggggaaatt

SEQ ID NO: 445 - DNA, 19 bp, Homo sapiens
cctcgcactggggaaatta

SEQ ID NO: 446 - DNA, 19 bp, Homo sapiens
ctcgcactggggaaattaa

SEQ ID NO: 447 - DNA, 19 bp, Homo sapiens
tcgcactggggaaattaac

SEQ ID NO: 448 - DNA, 19 bp, Homo sapiens
cgcactggggaaattaaca

SEQ ID NO: 449 - DNA, 19 bp, Homo sapiens
gcactggggaaattaacat

SEQ ID NO: 450 - DNA, 19 bp, Homo sapiens
cactggggaaattaacatc

SEQ ID NO: 451 - DNA, 19 bp, Homo sapiens
actggggaaattaacatca

SEQ ID NO: 452 - DNA, 19 bp, Homo sapiens
ctggggaaattaacatcac

SEQ ID NO: 453 - DNA, 19 bp, Homo sapiens
tggggaaattaacatcact

SEQ ID NO: 454 - DNA, 19 bp, Homo sapiens
ggggaaattaacatcactt

SEQ ID NO: 455 - DNA, 19 bp, Homo sapiens
gggaaattaacatcacttc

SEQ ID NO: 456 - DNA, 19 bp, Homo sapiens
ggaaattaacatcacttca

SEQ ID NO: 457 - DNA, 19 bp, Homo sapiens
gaaattaacatcacttcag

SEQ ID NO: 458 - DNA, 19 bp, Homo sapiens
aaattaacatcacttcagt

SEQ ID NO: 459 - DNA, 19 bp, Homo sapiens
aattaacatcacttcagtg

SEQ ID NO: 460 - DNA, 19 bp, Homo sapiens
attaacatcacttcagtgg

SEQ ID NO: 461 - DNA, 19 bp, Homo sapiens
ttaacatcacttcagtggt

SEQ ID NO: 462 - DNA, 19 bp, Homo sapiens
taacatcacttcagtggta

SEQ ID NO: 463 - DNA, 19 bp, Homo sapiens
aacatcacttcagtggtag

SEQ ID NO: 464 - DNA, 19 bp, Homo sapiens
acatcacttcagtggtaga

SEQ ID NO: 465 - DNA, 19 bp, Homo sapiens
catcacttcagtggtagac

SEQ ID NO: 466 - DNA, 19 bp, Homo sapiens
atcacttcagtggtagaca

SEQ ID NO: 467 - DNA, 19 bp, Homo sapiens
tcacttcagtggtagacag

SEQ ID NO: 468 - DNA, 19 bp, Homo sapiens
cacttcagtggtagacaga

SEQ ID NO: 469 - DNA, 19 bp, Homo sapiens
acttcagtggtagacagag

SEQ ID NO: 470 - DNA, 19 bp, Homo sapiens
cttcagtggtagacagaga

SEQ ID NO: 471 - DNA, 19 bp, Homo sapiens
ttcagtggtagacagagaa

SEQ ID NO: 472 - DNA, 19 bp, Homo sapiens
tcagtggtagacagagaaa

SEQ ID NO: 473 - DNA, 19 bp, Homo sapiens
cagtggtagacagagaaat

SEQ ID NO: 474 - DNA, 19 bp, Homo sapiens
agtggtagacagagaaata

SEQ ID NO: 475 - DNA, 19 bp, Homo sapiens
gtggtagacagagaaataa

SEQ ID NO: 476 - DNA, 19 bp, Homo sapiens
tggtagacagagaaataac

SEQ ID NO: 477 - DNA, 19 bp, Homo sapiens
ggtagacagagaaataact

SEQ ID NO: 478 - DNA, 19 bp, Homo sapiens
gtagacagagaaataactc

SEQ ID NO: 479 - DNA, 19 bp, Homo sapiens
tagacagagaaataactcc

SEQ ID NO: 480 - DNA, 19 bp, Homo sapiens
agacagagaaataactcca

SEQ ID NO: 481 - DNA, 19 bp, Homo sapiens
gacagagaaataactccac

SEQ ID NO: 482 - DNA, 19 bp, Homo sapiens
acagagaaataactccact

SEQ ID NO: 483 - DNA, 19 bp, Homo sapiens
cagagaaataactccactt

SEQ ID NO: 484 - DNA, 19 bp, Homo sapiens
agagaaataactccacttt

SEQ ID NO: 485 - DNA, 19 bp, Homo sapiens
gagaaataactccactttt

SEQ ID NO: 486 - DNA, 19 bp, Homo sapiens
agaaataactccacttttc

SEQ ID NO: 487 - DNA, 19 bp, Homo sapiens
gaaataactccacttttct

SEQ ID NO: 488 - DNA, 19 bp, Homo sapiens
aaataactccacttttctt

SEQ ID NO: 489 - DNA, 19 bp, Homo sapiens
aataactccacttttcttg

SEQ ID NO: 490 - DNA, 19 bp, Homo sapiens
ataactccacttttcttga

SEQ ID NO: 491 - DNA, 19 bp, Homo sapiens
taactccacttttcttgat

SEQ ID NO: 492 - DNA, 19 bp, Homo sapiens
aactccacttttcttgatc

SEQ ID NO: 493 - DNA, 19 bp, Homo sapiens
actccacttttcttgatct

SEQ ID NO: 494 - DNA, 19 bp, Homo sapiens
ctccacttttcttgatcta

SEQ ID NO: 495 - DNA, 19 bp, Homo sapiens
tccacttttcttgatctat

SEQ ID NO: 496 - DNA, 19 bp, Homo sapiens
ccacttttcttgatctatt

SEQ ID NO: 497 - DNA, 19 bp, Homo sapiens
cacttttcttgatctattg

SEQ ID NO: 498 - DNA, 19 bp, Homo sapiens
acttttcttgatctattgc

SEQ ID NO: 499 - DNA, 19 bp, Homo sapiens
cttttcttgatctattgcc

SEQ ID NO: 500 - DNA, 19 bp, Homo sapiens
ttttcttgatctattgccg

SEQ ID NO: 501 - DNA, 19 bp, Homo sapiens
tttcttgatctattgccgg

SEQ ID NO: 502 - DNA, 19 bp, Homo sapiens
ttcttgatctattgccggg

SEQ ID NO: 503 - DNA, 19 bp, Homo sapiens
tcttgatctattgccgggc

SEQ ID NO: 504 - DNA, 19 bp, Homo sapiens
cttgatctattgccgggct

SEQ ID NO: 505 - DNA, 19 bp, Homo sapiens
ttgatctattgccgggctc

SEQ ID NO: 506 - DNA, 19 bp, Homo sapiens
tgatctattgccgggctct

SEQ ID NO: 507 - DNA, 19 bp, Homo sapiens
gatctattgccgggctctg

SEQ ID NO: 508 - DNA, 19 bp, Homo sapiens
atctattgccgggctctga

SEQ ID NO: 509 - DNA, 19 bp, Homo sapiens
tctattgccgggctctgaa

SEQ ID NO: 510 - DNA, 19 bp, Homo sapiens
ctattgccgggctctgaat

SEQ ID NO: 511 - DNA, 19 bp, Homo sapiens
tattgccgggctctgaatt

SEQ ID NO: 512 - DNA, 19 bp, Homo sapiens
attgccgggctctgaattc

SEQ ID NO: 513 - DNA, 19 bp, Homo sapiens
ttgccgggctctgaattca

SEQ ID NO: 514 - DNA, 19 bp, Homo sapiens
tgccgggctctgaattcac

SEQ ID NO: 515 - DNA, 19 bp, Homo sapiens
gccgggctctgaattcacg

SEQ ID NO: 516 - DNA, 19 bp, Homo sapiens
ccgggctctgaattcacgg

SEQ ID NO: 517 - DNA, 19 bp, Homo sapiens
cgggctctgaattcacggg

SEQ ID NO: 518 - DNA, 19 bp, Homo sapiens
gggctctgaattcacgggg

SEQ ID NO: 519 - DNA, 19 bp, Homo sapiens
ggctctgaattcacggggt

SEQ ID NO: 520 - DNA, 19 bp, Homo sapiens
gctctgaattcacggggtg

SEQ ID NO: 521 - DNA, 19 bp, Homo sapiens
ctctgaattcacggggtga

SEQ ID NO: 522 - DNA, 19 bp, Homo sapiens
tctgaattcacggggtgaa

SEQ ID NO: 523 - DNA, 19 bp, Homo sapiens
ctgaattcacggggtgaag

SEQ ID NO: 524 - DNA, 19 bp, Homo sapiens
tgaattcacggggtgaaga

SEQ ID NO: 525 - DNA, 19 bp, Homo sapiens
gaattcacggggtgaagat

SEQ ID NO: 526 - DNA, 19 bp, Homo sapiens
aattcacggggtgaagatt

SEQ ID NO: 527 - DNA, 19 bp, Homo sapiens
attcacggggtgaagattt

SEQ ID NO: 528 - DNA, 19 bp, Homo sapiens
ttcacggggtgaagattta

SEQ ID NO: 529 - DNA, 19 bp, Homo sapiens
tcacggggtgaagatttag

SEQ ID NO: 530 - DNA, 19 bp, Homo sapiens
cacggggtgaagatttaga

SEQ ID NO: 531 - DNA, 19 bp, Homo sapiens
acggggtgaagatttagaa

SEQ ID NO: 532 - DNA, 19 bp, Homo sapiens
cggggtgaagatttagaaa

SEQ ID NO: 533 - DNA, 19 bp, Homo sapiens
ggggtgaagatttagaaag

SEQ ID NO: 534 - DNA, 19 bp, Homo sapiens
gggtgaagatttagaaagg

SEQ ID NO: 535 - DNA, 19 bp, Homo sapiens
ggtgaagatttagaaaggc

SEQ ID NO: 536 - DNA, 19 bp, Homo sapiens
gtgaagatttagaaaggcc

SEQ ID NO: 537 - DNA, 19 bp, Homo sapiens
tgaagatttagaaaggcct

SEQ ID NO: 538 - DNA, 19 bp, Homo sapiens
gaagatttagaaaggcctc

SEQ ID NO: 539 - DNA, 19 bp, Homo sapiens
aagatttagaaaggcctct

SEQ ID NO: 540 - DNA, 19 bp, Homo sapiens
agatttagaaaggcctctt

SEQ ID NO: 541 - DNA, 19 bp, Homo sapiens
gatttagaaaggcctcttg

SEQ ID NO: 542 - DNA, 19 bp, Homo sapiens
atttagaaaggcctcttga

SEQ ID NO: 543 - DNA, 19 bp, Homo sapiens
tttagaaaggcctcttgag

SEQ ID NO: 544 - DNA, 19 bp, Homo sapiens
ttagaaaggcctcttgagc

SEQ ID NO: 545 - DNA, 19 bp, Homo sapiens
tagaaaggcctcttgagct

SEQ ID NO: 546 - DNA, 19 bp, Homo sapiens
agaaaggcctcttgagctt

SEQ ID NO: 547 - DNA, 19 bp, Homo sapiens
gaaaggcctcttgagctta

SEQ ID NO: 548 - DNA, 19 bp, Homo sapiens
aaaggcctcttgagcttag

SEQ ID NO: 549 - DNA, 19 bp, Homo sapiens
aaggcctcttgagcttaga

SEQ ID NO: 550 - DNA, 19 bp, Homo sapiens
aggcctcttgagcttagag

SEQ ID NO: 551 - DNA, 19 bp, Homo sapiens
ggcctcttgagcttagagt

SEQ ID NO: 552 - DNA, 19 bp, Homo sapiens
gcctcttgagcttagagtc

SEQ ID NO: 553 - DNA, 19 bp, Homo sapiens
cctcttgagcttagagtca

SEQ ID NO: 554 - DNA, 19 bp, Homo sapiens
ctcttgagcttagagtcaa

SEQ ID NO: 555 - DNA, 19 bp, Homo sapiens
tcttgagcttagagtcaaa

SEQ ID NO: 556 - DNA, 19 bp, Homo sapiens
cttgagcttagagtcaaag

SEQ ID NO: 557 - DNA, 19 bp, Homo sapiens
ttgagcttagagtcaaagt

SEQ ID NO: 558 - DNA, 19 bp, Homo sapiens
tgagcttagagtcaaagtt

SEQ ID NO: 559 - DNA, 19 bp, Homo sapiens
gagcttagagtcaaagtta

SEQ ID NO: 560 - DNA, 19 bp, Homo sapiens
agcttagagtcaaagttat

SEQ ID NO: 561 - DNA, 19 bp, Homo sapiens
gcttagagtcaaagttatg

SEQ ID NO: 562 - DNA, 19 bp, Homo sapiens
cttagagtcaaagttatgg

SEQ ID NO: 563 - DNA, 19 bp, Homo sapiens
ttagagtcaaagttatgga

SEQ ID NO: 564 - DNA, 19 bp, Homo sapiens
tagagtcaaagttatggac

SEQ ID NO: 565 - DNA, 19 bp, Homo sapiens
agagtcaaagttatggaca

SEQ ID NO: 566 - DNA, 19 bp, Homo sapiens
gagtcaaagttatggacat

SEQ ID NO: 567 - DNA, 19 bp, Homo sapiens
agtcaaagttatggacata

SEQ ID NO: 568 - DNA, 19 bp, Homo sapiens
gtcaaagttatggacataa

SEQ ID NO: 569 - DNA, 19 bp, Homo sapiens
tcaaagttatggacataaa

SEQ ID NO: 570 - DNA, 19 bp, Homo sapiens
caaagttatggacataaat

SEQ ID NO: 571 - DNA, 19 bp, Homo sapiens
aaagttatggacataaatg

SEQ ID NO: 572 - DNA, 19 bp, Homo sapiens
aagttatggacataaatga

SEQ ID NO: 573 - DNA, 19 bp, Homo sapiens
agttatggacataaatgat

SEQ ID NO: 574 - DNA, 19 bp, Homo sapiens
gttatggacataaatgata

SEQ ID NO: 575 - DNA, 19 bp, Homo sapiens
ttatggacataaatgataa

SEQ ID NO: 576 - DNA, 19 bp, Homo sapiens
tatggacataaatgataac

SEQ ID NO: 577 - DNA, 19 bp, Homo sapiens
atggacataaatgataacg

SEQ ID NO: 578 - DNA, 19 bp, Homo sapiens
tggacataaatgataacgc

SEQ ID NO: 579 - DNA, 19 bp, Homo sapiens
ggacataaatgataacgct

SEQ ID NO: 580 - DNA, 19 bp, Homo sapiens
gacataaatgataacgctc

SEQ ID NO: 581 - DNA, 19 bp, Homo sapiens
acataaatgataacgctcc

SEQ ID NO: 582 - DNA, 19 bp, Homo sapiens
cataaatgataacgctcca

SEQ ID NO: 583 - DNA, 19 bp, Homo sapiens
ataaatgataacgctccag

SEQ ID NO: 584 - DNA, 19 bp, Homo sapiens
taaatgataacgctccagt

SEQ ID NO: 585 - DNA, 19 bp, Homo sapiens
aaatgataacgctccagtc

SEQ ID NO: 586 - DNA, 19 bp, Homo sapiens
aatgataacgctccagtct

SEQ ID NO: 587 - DNA, 19 bp, Homo sapiens
atgataacgctccagtctt

SEQ ID NO: 588 - DNA, 19 bp, Homo sapiens
tgataacgctccagtcttt

SEQ ID NO: 589 - DNA, 19 bp, Homo sapiens
gataacgctccagtctttt

SEQ ID NO: 590 - DNA, 19 bp, Homo sapiens
ataacgctccagtcttttc

SEQ ID NO: 591 - DNA, 19 bp, Homo sapiens
taacgctccagtcttttcg

SEQ ID NO: 592 - DNA, 19 bp, Homo sapiens
aacgctccagtcttttcgc

SEQ ID NO: 593 - DNA, 19 bp, Homo sapiens
acgctccagtcttttcgca

SEQ ID NO: 594 - DNA, 19 bp, Homo sapiens
cgctccagtcttttcgcaa

SEQ ID NO: 595 - DNA, 19 bp, Homo sapiens
gctccagtcttttcgcaaa

SEQ ID NO: 596 - DNA, 19 bp, Homo sapiens
ctccagtcttttcgcaaag

SEQ ID NO: 597 - DNA, 19 bp, Homo sapiens
tccagtcttttcgcaaagt

SEQ ID NO: 598 - DNA, 19 bp, Homo sapiens
ccagtcttttcgcaaagtg

SEQ ID NO: 599 - DNA, 19 bp, Homo sapiens
cagtcttttcgcaaagtgt

SEQ ID NO: 600 - DNA, 19 bp, Homo sapiens
agtcttttcgcaaagtgta

SEQ ID NO: 601 - DNA, 19 bp, Homo sapiens
gtcttttcgcaaagtgtat

SEQ ID NO: 602 - DNA, 19 bp, Homo sapiens
tcttttcgcaaagtgtata

SEQ ID NO: 603 - DNA, 19 bp, Homo sapiens
cttttcgcaaagtgtatac

SEQ ID NO: 604 - DNA, 19 bp, Homo sapiens
ttttcgcaaagtgtataca

SEQ ID NO: 605 - DNA, 19 bp, Homo sapiens
tttcgcaaagtgtatacac

SEQ ID NO: 606 - DNA, 19 bp, Homo sapiens
ttcgcaaagtgtatacaca

SEQ ID NO: 607 - DNA, 19 bp, Homo sapiens
tcgcaaagtgtatacacag

SEQ ID NO: 608 - DNA, 19 bp, Homo sapiens
cgcaaagtgtatacacagc

SEQ ID NO: 609 - DNA, 19 bp, Homo sapiens
gcaaagtgtatacacagcc

SEQ ID NO: 610 - DNA, 19 bp, Homo sapiens
caaagtgtatacacagcca

SEQ ID NO: 611 - DNA, 19 bp, Homo sapiens
aaagtgtatacacagccag

SEQ ID NO: 612 - DNA, 19 bp, Homo sapiens
aagtgtatacacagccagc

SEQ ID NO: 613 - DNA, 19 bp, Homo sapiens
agtgtatacacagccagca

SEQ ID NO: 614 - DNA, 19 bp, Homo sapiens
gtgtatacacagccagcat

SEQ ID NO: 615 - DNA, 19 bp, Homo sapiens
tgtatacacagccagcatt

SEQ ID NO: 616 - DNA, 19 bp, Homo sapiens
gtatacacagccagcattg

SEQ ID NO: 617 - DNA, 19 bp, Homo sapiens
tatacacagccagcattga

SEQ ID NO: 618 - DNA, 19 bp, Homo sapiens
atacacagccagcattgaa

SEQ ID NO: 619 - DNA, 19 bp, Homo sapiens
tacacagccagcattgaag

SEQ ID NO: 620 - DNA, 19 bp, Homo sapiens
acacagccagcattgaaga

SEQ ID NO: 621 - DNA, 19 bp, Homo sapiens
cacagccagcattgaagaa

SEQ ID NO: 622 - DNA, 19 bp, Homo sapiens
acagccagcattgaagaaa

SEQ ID NO: 623 - DNA, 19 bp, Homo sapiens
cagccagcattgaagaaaa

SEQ ID NO: 624 - DNA, 19 bp, Homo sapiens
agccagcattgaagaaaat

SEQ ID NO: 625 - DNA, 19 bp, Homo sapiens
gccagcattgaagaaaata

SEQ ID NO: 626 - DNA, 19 bp, Homo sapiens
ccagcattgaagaaaatag

SEQ ID NO: 627 - DNA, 19 bp, Homo sapiens
cagcattgaagaaaatagt

SEQ ID NO: 628 - DNA, 19 bp, Homo sapiens
agcattgaagaaaatagtg

SEQ ID NO: 629 - DNA, 19 bp, Homo sapiens
gcattgaagaaaatagtga

SEQ ID NO: 630 - DNA, 19 bp, Homo sapiens
cattgaagaaaatagtgat

SEQ ID NO: 631 - DNA, 19 bp, Homo sapiens
attgaagaaaatagtgatg

SEQ ID NO: 632 - DNA, 19 bp, Homo sapiens
ttgaagaaaatagtgatgc

SEQ ID NO: 633 - DNA, 19 bp, Homo sapiens
tgaagaaaatagtgatgcc

SEQ ID NO: 634 - DNA, 19 bp, Homo sapiens
gaagaaaatagtgatgcca

SEQ ID NO: 635 - DNA, 19 bp, Homo sapiens
aagaaaatagtgatgccaa

SEQ ID NO: 636 - DNA, 19 bp, Homo sapiens
agaaaatagtgatgccaat

SEQ ID NO: 637 - DNA, 19 bp, Homo sapiens
gaaaatagtgatgccaata

SEQ ID NO: 638 - DNA, 19 bp, Homo sapiens
aaaatagtgatgccaatac

SEQ ID NO: 639 - DNA, 19 bp, Homo sapiens
aaatagtgatgccaataca

SEQ ID NO: 640 - DNA, 19 bp, Homo sapiens
aatagtgatgccaatacat

SEQ ID NO: 641 - DNA, 19 bp, Homo sapiens
atagtgatgccaatacatt

SEQ ID NO: 642 - DNA, 19 bp, Homo sapiens
tagtgatgccaatacattg

SEQ ID NO: 643 - DNA, 19 bp, Homo sapiens
agtgatgccaatacattgg

SEQ ID NO: 644 - DNA, 19 bp, Homo sapiens
gtgatgccaatacattggt

SEQ ID NO: 645 - DNA, 19 bp, Homo sapiens
tgatgccaatacattggta

SEQ ID NO: 646 - DNA, 19 bp, Homo sapiens
gatgccaatacattggtag

SEQ ID NO: 647 - DNA, 19 bp, Homo sapiens
atgccaatacattggtagt

SEQ ID NO: 648 - DNA, 19 bp, Homo sapiens
tgccaatacattggtagta

SEQ ID NO: 649 - DNA, 19 bp, Homo sapiens
gccaatacattggtagtaa

SEQ ID NO: 650 - DNA, 19 bp, Homo sapiens
ccaatacattggtagtaaa

SEQ ID NO: 651 - DNA, 19 bp, Homo sapiens
caatacattggtagtaaag

SEQ ID NO: 652 - DNA, 19 bp, Homo sapiens
aatacattggtagtaaagt

SEQ ID NO: 653 - DNA, 19 bp, Homo sapiens
atacattggtagtaaagtt

SEQ ID NO: 654 - DNA, 19 bp, Homo sapiens
tacattggtagtaaagtta

SEQ ID NO: 655 - DNA, 19 bp, Homo sapiens
acattggtagtaaagttat

SEQ ID NO: 656 - DNA, 19 bp, Homo sapiens
cattggtagtaaagttatg

SEQ ID NO: 657 - DNA, 19 bp, Homo sapiens
attggtagtaaagttatgt

SEQ ID NO: 658 - DNA, 19 bp, Homo sapiens
ttggtagtaaagttatgtg

SEQ ID NO: 659 - DNA, 19 bp, Homo sapiens
tggtagtaaagttatgtgc

SEQ ID NO: 660 - DNA, 19 bp, Homo sapiens
ggtagtaaagttatgtgcc

SEQ ID NO: 661 - DNA, 19 bp, Homo sapiens
gtagtaaagttatgtgcca

SEQ ID NO: 662 - DNA, 19 bp, Homo sapiens
tagtaaagttatgtgccac

SEQ ID NO: 663 - DNA, 19 bp, Homo sapiens
agtaaagttatgtgccaca

SEQ ID NO: 664 - DNA, 19 bp, Homo sapiens
gtaaagttatgtgccacag

SEQ ID NO: 665 - DNA, 19 bp, Homo sapiens
taaagttatgtgccacaga

SEQ ID NO: 666 - DNA, 19 bp, Homo sapiens
aaagttatgtgccacagat

SEQ ID NO: 667 - DNA, 19 bp, Homo sapiens
aagttatgtgccacagatg

SEQ ID NO: 668 - DNA, 19 bp, Homo sapiens
agttatgtgccacagatgc

SEQ ID NO: 669 - DNA, 19 bp, Homo sapiens
gttatgtgccacagatgca

SEQ ID NO: 670 - DNA, 19 bp, Homo sapiens
ttatgtgccacagatgcag

SEQ ID NO: 671 - DNA, 19 bp, Homo sapiens
tatgtgccacagatgcaga

SEQ ID NO: 672 - DNA, 19 bp, Homo sapiens
atgtgccacagatgcagat

SEQ ID NO: 673 - DNA, 19 bp, Homo sapiens
tgtgccacagatgcagatg

SEQ ID NO: 674 - DNA, 19 bp, Homo sapiens
gtgccacagatgcagatga

SEQ ID NO: 675 - DNA, 19 bp, Homo sapiens
tgccacagatgcagatgaa

SEQ ID NO: 676 - DNA, 19 bp, Homo sapiens
gccacagatgcagatgaag

SEQ ID NO: 677 - DNA, 19 bp, Homo sapiens
ccacagatgcagatgaaga

SEQ ID NO: 678 - DNA, 19 bp, Homo sapiens
cacagatgcagatgaagaa

SEQ ID NO: 679 - DNA, 19 bp, Homo sapiens
acagatgcagatgaagaaa

SEQ ID NO: 680 - DNA, 19 bp, Homo sapiens
cagatgcagatgaagaaaa

SEQ ID NO: 681 - DNA, 19 bp, Homo sapiens
agatgcagatgaagaaaat

SEQ ID NO: 682 - DNA, 19 bp, Homo sapiens
gatgcagatgaagaaaatc

SEQ ID NO: 683 - DNA, 19 bp, Homo sapiens
atgcagatgaagaaaatca

SEQ ID NO: 684 - DNA, 19 bp, Homo sapiens
tgcagatgaagaaaatcat

SEQ ID NO: 685 - DNA, 19 bp, Homo sapiens
gcagatgaagaaaatcatc

SEQ ID NO: 686 - DNA, 19 bp, Homo sapiens
cagatgaagaaaatcatct

SEQ ID NO: 687 - DNA, 19 bp, Homo sapiens
agatgaagaaaatcatctg

SEQ ID NO: 688 - DNA, 19 bp, Homo sapiens
gatgaagaaaatcatctga

SEQ ID NO: 689 - DNA, 19 bp, Homo sapiens
atgaagaaaatcatctgaa

SEQ ID NO: 690 - DNA, 19 bp, Homo sapiens
tgaagaaaatcatctgaat

SEQ ID NO: 691 - DNA, 19 bp, Homo sapiens
gaagaaaatcatctgaatt

SEQ ID NO: 692 - DNA, 19 bp, Homo sapiens
aagaaaatcatctgaattc

SEQ ID NO: 693 - DNA, 19 bp, Homo sapiens
agaaaatcatctgaattct

SEQ ID NO: 694 - DNA, 19 bp, Homo sapiens
gaaaatcatctgaattcta

SEQ ID NO: 695 - DNA, 19 bp, Homo sapiens
aaaatcatctgaattctaa

SEQ ID NO: 696 - DNA, 19 bp, Homo sapiens
aaatcatctgaattctaaa

SEQ ID NO: 697 - DNA, 19 bp, Homo sapiens
aatcatctgaattctaaaa

SEQ ID NO: 698 - DNA, 19 bp, Homo sapiens
atcatctgaattctaaaat

SEQ ID NO: 699 - DNA, 19 bp, Homo sapiens
tcatctgaattctaaaatt

SEQ ID NO: 700 - DNA, 19 bp, Homo sapiens
catctgaattctaaaattg

SEQ ID NO: 701 - DNA, 19 bp, Homo sapiens
atctgaattctaaaattgc

SEQ ID NO: 702 - DNA, 19 bp, Homo sapiens
tctgaattctaaaattgcc

SEQ ID NO: 703 - DNA, 19 bp, Homo sapiens
ctgaattctaaaattgcct

SEQ ID NO: 704 - DNA, 19 bp, Homo sapiens
tgaattctaaaattgccta

SEQ ID NO: 705 - DNA, 19 bp, Homo sapiens
gaattctaaaattgcctac

SEQ ID NO: 706 - DNA, 19 bp, Homo sapiens
aattctaaaattgcctaca

SEQ ID NO: 707 - DNA, 19 bp, Homo sapiens
attctaaaattgcctacaa

SEQ ID NO: 708 - DNA, 19 bp, Homo sapiens
ttctaaaattgcctacaag

SEQ ID NO: 709 - DNA, 19 bp, Homo sapiens
tctaaaattgcctacaaga

SEQ ID NO: 710 - DNA, 19 bp, Homo sapiens
ctaaaattgcctacaagat

SEQ ID NO: 711 - DNA, 19 bp, Homo sapiens
taaaattgcctacaagatc

SEQ ID NO: 712 - DNA, 19 bp, Homo sapiens
aaaattgcctacaagatcg

SEQ ID NO: 713 - DNA, 19 bp, Homo sapiens
aaattgcctacaagatcgt

SEQ ID NO: 714 - DNA, 19 bp, Homo sapiens
aattgcctacaagatcgtc

SEQ ID NO: 715 - DNA, 19 bp, Homo sapiens
attgcctacaagatcgtct

SEQ ID NO: 716 - DNA, 19 bp, Homo sapiens
ttgcctacaagatcgtctc

SEQ ID NO: 717 - DNA, 19 bp, Homo sapiens
tgcctacaagatcgtctct

SEQ ID NO: 718 - DNA, 19 bp, Homo sapiens
gcctacaagatcgtctctc

SEQ ID NO: 719 - DNA, 19 bp, Homo sapiens
cctacaagatcgtctctca

SEQ ID NO: 720 - DNA, 19 bp, Homo sapiens
ctacaagatcgtctctcag

SEQ ID NO: 721 - DNA, 19 bp, Homo sapiens
tacaagatcgtctctcagg

SEQ ID NO: 722 - DNA, 19 bp, Homo sapiens
acaagatcgtctctcagga

SEQ ID NO: 723 - DNA, 19 bp, Homo sapiens
caagatcgtctctcaggag

SEQ ID NO: 724 - DNA, 19 bp, Homo sapiens
aagatcgtctctcaggagc

SEQ ID NO: 725 - DNA, 19 bp, Homo sapiens
agatcgtctctcaggagcc

SEQ ID NO: 726 - DNA, 19 bp, Homo sapiens
gatcgtctctcaggagcca

SEQ ID NO: 727 - DNA, 19 bp, Homo sapiens
atcgtctctcaggagccat

SEQ ID NO: 728 - DNA, 19 bp, Homo sapiens
tcgtctctcaggagccatc

SEQ ID NO: 729 - DNA, 19 bp, Homo sapiens
cgtctctcaggagccatca

SEQ ID NO: 730 - DNA, 19 bp, Homo sapiens
gtctctcaggagccatcag

SEQ ID NO: 731 - DNA, 19 bp, Homo sapiens
tctctcaggagccatcagg

SEQ ID NO: 732 - DNA, 19 bp, Homo sapiens
ctctcaggagccatcaggt

SEQ ID NO: 733 - DNA, 19 bp, Homo sapiens
tctcaggagccatcaggtg

SEQ ID NO: 734 - DNA, 19 bp, Homo sapiens
ctcaggagccatcaggtgc

SEQ ID NO: 735 - DNA, 19 bp, Homo sapiens
tcaggagccatcaggtgca

SEQ ID NO: 736 - DNA, 19 bp, Homo sapiens
caggagccatcaggtgcac

SEQ ID NO: 737 - DNA, 19 bp, Homo sapiens
aggagccatcaggtgcacc

SEQ ID NO: 738 - DNA, 19 bp, Homo sapiens
ggagccatcaggtgcaccc

SEQ ID NO: 739 - DNA, 19 bp, Homo sapiens
gagccatcaggtgcaccca

SEQ ID NO: 740 - DNA, 19 bp, Homo sapiens
agccatcaggtgcacccat

SEQ ID NO: 741 - DNA, 19 bp, Homo sapiens
gccatcaggtgcacccatg

SEQ ID NO: 742 - DNA, 19 bp, Homo sapiens
ccatcaggtgcacccatgt

SEQ ID NO: 743 - DNA, 19 bp, Homo sapiens
catcaggtgcacccatgtt

SEQ ID NO: 744 - DNA, 19 bp, Homo sapiens
atcaggtgcacccatgttc

SEQ ID NO: 745 - DNA, 19 bp, Homo sapiens
tcaggtgcacccatgttca

SEQ ID NO: 746 - DNA, 19 bp, Homo sapiens
caggtgcacccatgttcat

SEQ ID NO: 747 - DNA, 19 bp, Homo sapiens
aggtgcacccatgttcatt

SEQ ID NO: 748 - DNA, 19 bp, Homo sapiens
ggtgcacccatgttcattc

SEQ ID NO: 749 - DNA, 19 bp, Homo sapiens
gtgcacccatgttcattct

SEQ ID NO: 750 - DNA, 19 bp, Homo sapiens
tgcacccatgttcattctg

SEQ ID NO: 751 - DNA, 19 bp, Homo sapiens
gcacccatgttcattctga

SEQ ID NO: 752 - DNA, 19 bp, Homo sapiens
cacccatgttcattctgaa

SEQ ID NO: 753 - DNA, 19 bp, Homo sapiens
acccatgttcattctgaat

SEQ ID NO: 754 - DNA, 19 bp, Homo sapiens
cccatgttcattctgaata

SEQ ID NO: 755 - DNA, 19 bp, Homo sapiens
ccatgttcattctgaatag

SEQ ID NO: 756 - DNA, 19 bp, Homo sapiens
catgttcattctgaatagg

SEQ ID NO: 757 - DNA, 19 bp, Homo sapiens
atgttcattctgaataggt

SEQ ID NO: 758 - DNA, 19 bp, Homo sapiens
tgttcattctgaataggta

SEQ ID NO: 759 - DNA, 19 bp, Homo sapiens
gttcattctgaataggtac

SEQ ID NO: 760 - DNA, 19 bp, Homo sapiens
ttcattctgaataggtaca

SEQ ID NO: 761 - DNA, 19 bp, Homo sapiens
tcattctgaataggtacac

SEQ ID NO: 762 - DNA, 19 bp, Homo sapiens
cattctgaataggtacact

SEQ ID NO: 763 - DNA, 19 bp, Homo sapiens
attctgaataggtacactg

SEQ ID NO: 764 - DNA, 19 bp, Homo sapiens
ttctgaataggtacactgg

SEQ ID NO: 765 - DNA, 19 bp, Homo sapiens
tctgaataggtacactgga

SEQ ID NO: 766 - DNA, 19 bp, Homo sapiens
ctgaataggtacactggag

SEQ ID NO: 767 - DNA, 19 bp, Homo sapiens
tgaataggtacactggaga

SEQ ID NO: 768 - DNA, 19 bp, Homo sapiens
gaataggtacactggagaa

SEQ ID NO: 769 - DNA, 19 bp, Homo sapiens
aataggtacactggagaag

SEQ ID NO: 770 - DNA, 19 bp, Homo sapiens
ataggtacactggagaagt

SEQ ID NO: 771 - DNA, 19 bp, Homo sapiens
taggtacactggagaagtc

SEQ ID NO: 772 - DNA, 19 bp, Homo sapiens
aggtacactggagaagtct

SEQ ID NO: 773 - DNA, 19 bp, Homo sapiens
ggtacactggagaagtctg

SEQ ID NO: 774 - DNA, 19 bp, Homo sapiens
gtacactggagaagtctgc

SEQ ID NO: 775 - DNA, 19 bp, Homo sapiens
tacactggagaagtctgca

SEQ ID NO: 776 - DNA, 19 bp, Homo sapiens
acactggagaagtctgcac

SEQ ID NO: 777 - DNA, 19 bp, Homo sapiens
cactggagaagtctgcacc

SEQ ID NO: 778 - DNA, 19 bp, Homo sapiens
actggagaagtctgcacca

SEQ ID NO: 779 - DNA, 19 bp, Homo sapiens
ctggagaagtctgcaccat

SEQ ID NO: 780 - DNA, 19 bp, Homo sapiens
tggagaagtctgcaccatg

SEQ ID NO: 781 - DNA, 19 bp, Homo sapiens
ggagaagtctgcaccatgt

SEQ ID NO: 782 - DNA, 19 bp, Homo sapiens
gagaagtctgcaccatgtc

SEQ ID NO: 783 - DNA, 19 bp, Homo sapiens
agaagtctgcaccatgtcc

SEQ ID NO: 784 - DNA, 19 bp, Homo sapiens
gaagtctgcaccatgtcca

SEQ ID NO: 785 - DNA, 19 bp, Homo sapiens
aagtctgcaccatgtccag

SEQ ID NO: 786 - DNA, 19 bp, Homo sapiens
agtctgcaccatgtccagt

SEQ ID NO: 787 - DNA, 19 bp, Homo sapiens
gtctgcaccatgtccagtt

SEQ ID NO: 788 - DNA, 19 bp, Homo sapiens
tctgcaccatgtccagttt

SEQ ID NO: 789 - DNA, 19 bp, Homo sapiens
ctgcaccatgtccagtttc

SEQ ID NO: 790 - DNA, 19 bp, Homo sapiens
tgcaccatgtccagtttct

SEQ ID NO: 791 - DNA, 19 bp, Homo sapiens
gcaccatgtccagtttctt

SEQ ID NO: 792 - DNA, 19 bp, Homo sapiens
caccatgtccagtttcttg

SEQ ID NO: 793 - DNA, 19 bp, Homo sapiens
accatgtccagtttcttgg

SEQ ID NO: 794 - DNA, 19 bp, Homo sapiens
ccatgtccagtttcttgga

SEQ ID NO: 795 - DNA, 19 bp, Homo sapiens
catgtccagtttcttggac

SEQ ID NO: 796 - DNA, 19 bp, Homo sapiens
atgtccagtttcttggaca

SEQ ID NO: 797 - DNA, 19 bp, Homo sapiens
tgtccagtttcttggacag

SEQ ID NO: 798 - DNA, 19 bp, Homo sapiens
gtccagtttcttggacaga

SEQ ID NO: 799 - DNA, 19 bp, Homo sapiens
tccagtttcttggacagag

SEQ ID NO: 800 - DNA, 19 bp, Homo sapiens
ccagtttcttggacagaga

SEQ ID NO: 801 - DNA, 19 bp, Homo sapiens
cagtttcttggacagagag

SEQ ID NO: 802 - DNA, 19 bp, Homo sapiens
agtttcttggacagagagc

SEQ ID NO: 803 - DNA, 19 bp, Homo sapiens
gtttcttggacagagagca

SEQ ID NO: 804 - DNA, 19 bp, Homo sapiens
tttcttggacagagagcaa

SEQ ID NO: 805 - DNA, 19 bp, Homo sapiens
ttcttggacagagagcaac

SEQ ID NO: 806 - DNA, 19 bp, Homo sapiens
tcttggacagagagcaaca

SEQ ID NO: 807 - DNA, 19 bp, Homo sapiens
cttggacagagagcaacac

SEQ ID NO: 808 - DNA, 19 bp, Homo sapiens
ttggacagagagcaacaca

SEQ ID NO: 809 - DNA, 19 bp, Homo sapiens
tggacagagagcaacacag

SEQ ID NO: 810 - DNA, 19 bp, Homo sapiens
ggacagagagcaacacagt

SEQ ID NO: 811 - DNA, 19 bp, Homo sapiens
gacagagagcaacacagta

SEQ ID NO: 812 - DNA, 19 bp, Homo sapiens
acagagagcaacacagtat

SEQ ID NO: 813 - DNA, 19 bp, Homo sapiens
cagagagcaacacagtatg

SEQ ID NO: 814 - DNA, 19 bp, Homo sapiens
agagagcaacacagtatgt

SEQ ID NO: 815 - DNA, 19 bp, Homo sapiens
gagagcaacacagtatgta

SEQ ID NO: 816 - DNA, 19 bp, Homo sapiens
agagcaacacagtatgtac

SEQ ID NO: 817 - DNA, 19 bp, Homo sapiens
gagcaacacagtatgtaca

SEQ ID NO: 818 - DNA, 19 bp, Homo sapiens
agcaacacagtatgtacaa

SEQ ID NO: 819 - DNA, 19 bp, Homo sapiens
gcaacacagtatgtacaac

SEQ ID NO: 820 - DNA, 19 bp, Homo sapiens
caacacagtatgtacaacc

SEQ ID NO: 821 - DNA, 19 bp, Homo sapiens
aacacagtatgtacaacct

SEQ ID NO: 822 - DNA, 19 bp, Homo sapiens
acacagtatgtacaacctg

SEQ ID NO: 823 - DNA, 19 bp, Homo sapiens
cacagtatgtacaacctgg

SEQ ID NO: 824 - DNA, 19 bp, Homo sapiens
acagtatgtacaacctggt

SEQ ID NO: 825 - DNA, 19 bp, Homo sapiens
cagtatgtacaacctggtt

SEQ ID NO: 826 - DNA, 19 bp, Homo sapiens
agtatgtacaacctggttg

SEQ ID NO: 827 - DNA, 19 bp, Homo sapiens
gtatgtacaacctggttgt

SEQ ID NO: 828 - DNA, 19 bp, Homo sapiens
tatgtacaacctggttgtg

SEQ ID NO: 829 - DNA, 19 bp, Homo sapiens
atgtacaacctggttgtga

SEQ ID NO: 830 - DNA, 19 bp, Homo sapiens
tgtacaacctggttgtgag

SEQ ID NO: 831 - DNA, 19 bp, Homo sapiens
gtacaacctggttgtgaga

SEQ ID NO: 832 - DNA, 19 bp, Homo sapiens
tacaacctggttgtgagag

SEQ ID NO: 833 - DNA, 19 bp, Homo sapiens
acaacctggttgtgagagg

SEQ ID NO: 834 - DNA, 19 bp, Homo sapiens
caacctggttgtgagaggc

SEQ ID NO: 835 - DNA, 19 bp, Homo sapiens
aacctggttgtgagaggct

SEQ ID NO: 836 - DNA, 19 bp, Homo sapiens
acctggttgtgagaggctc

SEQ ID NO: 837 - DNA, 19 bp, Homo sapiens
cctggttgtgagaggctca

SEQ ID NO: 838 - DNA, 19 bp, Homo sapiens
ctggttgtgagaggctcag

SEQ ID NO: 839 - DNA, 19 bp, Homo sapiens
tggttgtgagaggctcaga

SEQ ID NO: 840 - DNA, 19 bp, Homo sapiens
ggttgtgagaggctcagat

SEQ ID NO: 841 - DNA, 19 bp, Homo sapiens
gttgtgagaggctcagatc

SEQ ID NO: 842 - DNA, 19 bp, Homo sapiens
ttgtgagaggctcagatcg

SEQ ID NO: 843 - DNA, 19 bp, Homo sapiens
tgtgagaggctcagatcgg

SEQ ID NO: 844 - DNA, 19 bp, Homo sapiens
gtgagaggctcagatcggg

SEQ ID NO: 845 - DNA, 19 bp, Homo sapiens
tgagaggctcagatcggga

SEQ ID NO: 846 - DNA, 19 bp, Homo sapiens
gagaggctcagatcgggat

SEQ ID NO: 847 - DNA, 19 bp, Homo sapiens
agaggctcagatcgggatg

SEQ ID NO: 848 - DNA, 19 bp, Homo sapiens
gaggctcagatcgggatgg

SEQ ID NO: 849 - DNA, 19 bp, Homo sapiens
aggctcagatcgggatgga

SEQ ID NO: 850 - DNA, 19 bp, Homo sapiens
ggctcagatcgggatggag

SEQ ID NO: 851 - DNA, 19 bp, Homo sapiens
gctcagatcgggatggagc

SEQ ID NO: 852 - DNA, 19 bp, Homo sapiens
ctcagatcgggatggagct

SEQ ID NO: 853 - DNA, 19 bp, Homo sapiens
tcagatcgggatggagctg

SEQ ID NO: 854 - DNA, 19 bp, Homo sapiens
cagatcgggatggagctgc

SEQ ID NO: 855 - DNA, 19 bp, Homo sapiens
agatcgggatggagctgca

SEQ ID NO: 856 - DNA, 19 bp, Homo sapiens
gatcgggatggagctgcag

SEQ ID NO: 857 - DNA, 19 bp, Homo sapiens
atcgggatggagctgcaga

SEQ ID NO: 858 - DNA, 19 bp, Homo sapiens
tcgggatggagctgcagat

SEQ ID NO: 859 - DNA, 19 bp, Homo sapiens
cgggatggagctgcagatg

SEQ ID NO: 860 - DNA, 19 bp, Homo sapiens
gggatggagctgcagatgg

SEQ ID NO: 861 - DNA, 19 bp, Homo sapiens
ggatggagctgcagatgga

SEQ ID NO: 862 - DNA, 19 bp, Homo sapiens
gatggagctgcagatggac

SEQ ID NO: 863 - DNA, 19 bp, Homo sapiens
atggagctgcagatggact

SEQ ID NO: 864 - DNA, 19 bp, Homo sapiens
tggagctgcagatggactg

SEQ ID NO: 865 - DNA, 19 bp, Homo sapiens
ggagctgcagatggactgt

SEQ ID NO: 866 - DNA, 19 bp, Homo sapiens
gagctgcagatggactgtc

SEQ ID NO: 867 - DNA, 19 bp, Homo sapiens
agctgcagatggactgtct

SEQ ID NO: 868 - DNA, 19 bp, Homo sapiens
gctgcagatggactgtctt

SEQ ID NO: 869 - DNA, 19 bp, Homo sapiens
ctgcagatggactgtcttc

SEQ ID NO: 870 - DNA, 19 bp, Homo sapiens
tgcagatggactgtcttct

SEQ ID NO: 871 - DNA, 19 bp, Homo sapiens
gcagatggactgtcttctg

SEQ ID NO: 872 - DNA, 19 bp, Homo sapiens
cagatggactgtcttctga

SEQ ID NO: 873 - DNA, 19 bp, Homo sapiens
agatggactgtcttctgag

SEQ ID NO: 874 - DNA, 19 bp, Homo sapiens
gatggactgtcttctgagt

SEQ ID NO: 875 - DNA, 19 bp, Homo sapiens
atggactgtcttctgagtg

SEQ ID NO: 876 - DNA, 19 bp, Homo sapiens
tggactgtcttctgagtgt

SEQ ID NO: 877 - DNA, 19 bp, Homo sapiens
ggactgtcttctgagtgtg

SEQ ID NO: 878 - DNA, 19 bp, Homo sapiens
gactgtcttctgagtgtga

SEQ ID NO: 879 - DNA, 19 bp, Homo sapiens
actgtcttctgagtgtgac

SEQ ID NO: 880 - DNA, 19 bp, Homo sapiens
ctgtcttctgagtgtgact

SEQ ID NO: 881 - DNA, 19 bp, Homo sapiens
tgtcttctgagtgtgactg

SEQ ID NO: 882 - DNA, 19 bp, Homo sapiens
gtcttctgagtgtgactgt

SEQ ID NO: 883 - DNA, 19 bp, Homo sapiens
tcttctgagtgtgactgta

SEQ ID NO: 884 - DNA, 19 bp, Homo sapiens
cttctgagtgtgactgtag

SEQ ID NO: 885 - DNA, 19 bp, Homo sapiens
ttctgagtgtgactgtaga

SEQ ID NO: 886 - DNA, 19 bp, Homo sapiens
tctgagtgtgactgtagaa

SEQ ID NO: 887 - DNA, 19 bp, Homo sapiens
ctgagtgtgactgtagaat

SEQ ID NO: 888 - DNA, 19 bp, Homo sapiens
tgagtgtgactgtagaatc

SEQ ID NO: 889 - DNA, 19 bp, Homo sapiens
gagtgtgactgtagaatca

SEQ ID NO: 890 - DNA, 19 bp, Homo sapiens
agtgtgactgtagaatcaa

SEQ ID NO: 891 - DNA, 19 bp, Homo sapiens
gtgtgactgtagaatcaag

SEQ ID NO: 892 - DNA, 19 bp, Homo sapiens
tgtgactgtagaatcaagg

SEQ ID NO: 893 - DNA, 19 bp, Homo sapiens
gtgactgtagaatcaaggt

SEQ ID NO: 894 - DNA, 19 bp, Homo sapiens
tgactgtagaatcaaggtt

SEQ ID NO: 895 - DNA, 19 bp, Homo sapiens
gactgtagaatcaaggttt

SEQ ID NO: 896 - DNA, 19 bp, Homo sapiens
actgtagaatcaaggtttt

SEQ ID NO: 897 - DNA, 19 bp, Homo sapiens
ctgtagaatcaaggtttta

SEQ ID NO: 898 - DNA, 19 bp, Homo sapiens
tgtagaatcaaggttttag

SEQ ID NO: 899 - DNA, 19 bp, Homo sapiens
gtagaatcaaggttttaga

SEQ ID NO: 900 - DNA, 19 bp, Homo sapiens
tagaatcaaggttttagac

SEQ ID NO: 901 - DNA, 19 bp, Homo sapiens
agaatcaaggttttagacg

SEQ ID NO: 902 - DNA, 19 bp, Homo sapiens
gaatcaaggttttagacgt

SEQ ID NO: 903 - DNA, 19 bp, Homo sapiens
aatcaaggttttagacgtc

SEQ ID NO: 904 - DNA, 19 bp, Homo sapiens
atcaaggttttagacgtca

SEQ ID NO: 905 - DNA, 19 bp, Homo sapiens
tcaaggttttagacgtcaa

SEQ ID NO: 906 - DNA, 19 bp, Homo sapiens
caaggttttagacgtcaac

SEQ ID NO: 907 - DNA, 19 bp, Homo sapiens
aaggttttagacgtcaacg

SEQ ID NO: 908 - DNA, 19 bp, Homo sapiens
aggttttagacgtcaacga

SEQ ID NO: 909 - DNA, 19 bp, Homo sapiens
ggttttagacgtcaacgat

SEQ ID NO: 910 - DNA, 19 bp, Homo sapiens
gttttagacgtcaacgata

SEQ ID NO: 911 - DNA, 19 bp, Homo sapiens
ttttagacgtcaacgataa

SEQ ID NO: 912 - DNA, 19 bp, Homo sapiens
tttagacgtcaacgataat

SEQ ID NO: 913 - DNA, 19 bp, Homo sapiens
ttagacgtcaacgataatt

SEQ ID NO: 914 - DNA, 19 bp, Homo sapiens
tagacgtcaacgataattt

SEQ ID NO: 915 - DNA, 19 bp, Homo sapiens
agacgtcaacgataatttc

SEQ ID NO: 916 - DNA, 19 bp, Homo sapiens
gacgtcaacgataatttcc

SEQ ID NO: 917 - DNA, 19 bp, Homo sapiens
acgtcaacgataatttccc

SEQ ID NO: 918 - DNA, 19 bp, Homo sapiens
cgtcaacgataatttcccc

SEQ ID NO: 919 - DNA, 19 bp, Homo sapiens
gtcaacgataatttcccca

SEQ ID NO: 920 - DNA, 19 bp, Homo sapiens
tcaacgataatttccccac

SEQ ID NO: 921 - DNA, 19 bp, Homo sapiens
caacgataatttccccacc

SEQ ID NO: 922 - DNA, 19 bp, Homo sapiens
aacgataatttccccacct

SEQ ID NO: 923 - DNA, 19 bp, Homo sapiens
acgataatttccccacctt

SEQ ID NO: 924 - DNA, 19 bp, Homo sapiens
cgataatttccccacctta

SEQ ID NO: 925 - DNA, 19 bp, Homo sapiens
gataatttccccaccttag

SEQ ID NO: 926 - DNA, 19 bp, Homo sapiens
ataatttccccaccttaga

SEQ ID NO: 927 - DNA, 19 bp, Homo sapiens
taatttccccaccttagag

SEQ ID NO: 928 - DNA, 19 bp, Homo sapiens
aatttccccaccttagaga

SEQ ID NO: 929 - DNA, 19 bp, Homo sapiens
atttccccaccttagagaa

SEQ ID NO: 930 - DNA, 19 bp, Homo sapiens
tttccccaccttagagaaa

SEQ ID NO: 931 - DNA, 19 bp, Homo sapiens
ttccccaccttagagaaaa

SEQ ID NO: 932 - DNA, 19 bp, Homo sapiens
tccccaccttagagaaaac

SEQ ID NO: 933 - DNA, 19 bp, Homo sapiens
ccccaccttagagaaaact

SEQ ID NO: 934 - DNA, 19 bp, Homo sapiens
cccaccttagagaaaactt

SEQ ID NO: 935 - DNA, 19 bp, Homo sapiens
ccaccttagagaaaacttc

SEQ ID NO: 936 - DNA, 19 bp, Homo sapiens
caccttagagaaaacttca

SEQ ID NO: 937 - DNA, 19 bp, Homo sapiens
accttagagaaaacttcat

SEQ ID NO: 938 - DNA, 19 bp, Homo sapiens
ccttagagaaaacttcata

SEQ ID NO: 939 - DNA, 19 bp, Homo sapiens
cttagagaaaacttcatac

SEQ ID NO: 940 - DNA, 19 bp, Homo sapiens
ttagagaaaacttcatact

SEQ ID NO: 941 - DNA, 19 bp, Homo sapiens
tagagaaaacttcatactc

SEQ ID NO: 942 - DNA, 19 bp, Homo sapiens
agagaaaacttcatactca

SEQ ID NO: 943 - DNA, 19 bp, Homo sapiens
gagaaaacttcatactcag

SEQ ID NO: 944 - DNA, 19 bp, Homo sapiens
agaaaacttcatactcagc

SEQ ID NO: 945 - DNA, 19 bp, Homo sapiens
gaaaacttcatactcagcc

SEQ ID NO: 946 - DNA, 19 bp, Homo sapiens
aaaacttcatactcagcca

SEQ ID NO: 947 - DNA, 19 bp, Homo sapiens
aaacttcatactcagccag

SEQ ID NO: 948 - DNA, 19 bp, Homo sapiens
aacttcatactcagccagt

SEQ ID NO: 949 - DNA, 19 bp, Homo sapiens
acttcatactcagccagta

SEQ ID NO: 950 - DNA, 19 bp, Homo sapiens
cttcatactcagccagtat

SEQ ID NO: 951 - DNA, 19 bp, Homo sapiens
ttcatactcagccagtatt

SEQ ID NO: 952 - DNA, 19 bp, Homo sapiens
tcatactcagccagtattg

SEQ ID NO: 953 - DNA, 19 bp, Homo sapiens
catactcagccagtattga

SEQ ID NO: 954 - DNA, 19 bp, Homo sapiens
atactcagccagtattgaa

SEQ ID NO: 955 - DNA, 19 bp, Homo sapiens
tactcagccagtattgaag

SEQ ID NO: 956 - DNA, 19 bp, Homo sapiens
actcagccagtattgaaga

SEQ ID NO: 957 - DNA, 19 bp, Homo sapiens
ctcagccagtattgaagag

SEQ ID NO: 958 - DNA, 19 bp, Homo sapiens
tcagccagtattgaagaga

SEQ ID NO: 959 - DNA, 19 bp, Homo sapiens
cagccagtattgaagagaa

SEQ ID NO: 960 - DNA, 19 bp, Homo sapiens
agccagtattgaagagaat

SEQ ID NO: 961 - DNA, 19 bp, Homo sapiens
gccagtattgaagagaatt

SEQ ID NO: 962 - DNA, 19 bp, Homo sapiens
ccagtattgaagagaattg

SEQ ID NO: 963 - DNA, 19 bp, Homo sapiens
cagtattgaagagaattgt

SEQ ID NO: 964 - DNA, 19 bp, Homo sapiens
agtattgaagagaattgtt

SEQ ID NO: 965 - DNA, 19 bp, Homo sapiens
gtattgaagagaattgttt

SEQ ID NO: 966 - DNA, 19 bp, Homo sapiens
tattgaagagaattgttta

SEQ ID NO: 967 - DNA, 19 bp, Homo sapiens
attgaagagaattgtttaa

SEQ ID NO: 968 - DNA, 19 bp, Homo sapiens
ttgaagagaattgtttaag

SEQ ID NO: 969 - DNA, 19 bp, Homo sapiens
tgaagagaattgtttaagt

SEQ ID NO: 970 - DNA, 19 bp, Homo sapiens
gaagagaattgtttaagtt

SEQ ID NO: 971 - DNA, 19 bp, Homo sapiens
aagagaattgtttaagttc

SEQ ID NO: 972 - DNA, 19 bp, Homo sapiens
agagaattgtttaagttcg

SEQ ID NO: 973 - DNA, 19 bp, Homo sapiens
gagaattgtttaagttcgg

SEQ ID NO: 974 - DNA, 19 bp, Homo sapiens
agaattgtttaagttcgga

SEQ ID NO: 975 - DNA, 19 bp, Homo sapiens
gaattgtttaagttcggaa

SEQ ID NO: 976 - DNA, 19 bp, Homo sapiens
aattgtttaagttcggaac

SEQ ID NO: 977 - DNA, 19 bp, Homo sapiens
attgtttaagttcggaact

SEQ ID NO: 978 - DNA, 19 bp, Homo sapiens
ttgtttaagttcggaactg

SEQ ID NO: 979 - DNA, 19 bp, Homo sapiens
tgtttaagttcggaactga

SEQ ID NO: 980 - DNA, 19 bp, Homo sapiens
gtttaagttcggaactgat

SEQ ID NO: 981 - DNA, 19 bp, Homo sapiens
tttaagttcggaactgata

SEQ ID NO: 982 - DNA, 19 bp, Homo sapiens
ttaagttcggaactgatac

SEQ ID NO: 983 - DNA, 19 bp, Homo sapiens
taagttcggaactgatacg

SEQ ID NO: 984 - DNA, 19 bp, Homo sapiens
aagttcggaactgatacga

SEQ ID NO: 985 - DNA, 19 bp, Homo sapiens
agttcggaactgatacgat

SEQ ID NO: 986 - DNA, 19 bp, Homo sapiens
gttcggaactgatacgatt

SEQ ID NO: 987 - DNA, 19 bp, Homo sapiens
ttcggaactgatacgatta

SEQ ID NO: 988 - DNA, 19 bp, Homo sapiens
tcggaactgatacgattac

SEQ ID NO: 989 - DNA, 19 bp, Homo sapiens
cggaactgatacgattaca

SEQ ID NO: 990 - DNA, 19 bp, Homo sapiens
ggaactgatacgattacaa

SEQ ID NO: 991 - DNA, 19 bp, Homo sapiens
gaactgatacgattacaag

SEQ ID NO: 992 - DNA, 19 bp, Homo sapiens
aactgatacgattacaagc

SEQ ID NO: 993 - DNA, 19 bp, Homo sapiens
actgatacgattacaagca

SEQ ID NO: 994 - DNA, 19 bp, Homo sapiens
ctgatacgattacaagcaa

SEQ ID NO: 995 - DNA, 19 bp, Homo sapiens
tgatacgattacaagcaat

SEQ ID NO: 996 - DNA, 19 bp, Homo sapiens
gatacgattacaagcaatt

SEQ ID NO: 997 - DNA, 19 bp, Homo sapiens
atacgattacaagcaattg

SEQ ID NO: 998 - DNA, 19 bp, Homo sapiens
tacgattacaagcaattga

SEQ ID NO: 999 - DNA, 19 bp, Homo sapiens
acgattacaagcaattgat

SEQ ID NO: 1000 - DNA, 19 bp, Homo sapiens
cgattacaagcaattgatc

SEQ ID NO: 1001 - DNA, 19 bp, Homo sapiens
gattacaagcaattgatct

SEQ ID NO: 1002 - DNA, 19 bp, Homo sapiens
attacaagcaattgatctt

SEQ ID NO: 1003 - DNA, 19 bp, Homo sapiens
ttacaagcaattgatcttg

SEQ ID NO: 1004 - DNA, 19 bp, Homo sapiens
tacaagcaattgatcttga

SEQ ID NO: 1005 - DNA, 19 bp, Homo sapiens
acaagcaattgatcttgat

SEQ ID NO: 1006 - DNA, 19 bp, Homo sapiens
caagcaattgatcttgatg

SEQ ID NO: 1007 - DNA, 19 bp, Homo sapiens
aagcaattgatcttgatga

SEQ ID NO: 1008 - DNA, 19 bp, Homo sapiens
agcaattgatcttgatgaa

SEQ ID NO: 1009 - DNA, 19 bp, Homo sapiens
gcaattgatcttgatgaag

SEQ ID NO: 1010 - DNA, 19 bp, Homo sapiens
caattgatcttgatgaaga

SEQ ID NO: 1011 - DNA, 19 bp, Homo sapiens
aattgatcttgatgaagaa

SEQ ID NO: 1012 - DNA, 19 bp, Homo sapiens
attgatcttgatgaagaag

SEQ ID NO: 1013 - DNA, 19 bp, Homo sapiens
ttgatcttgatgaagaagg

SEQ ID NO: 1014 - DNA, 19 bp, Homo sapiens
tgatcttgatgaagaaggc

SEQ ID NO: 1015 - DNA, 19 bp, Homo sapiens
gatcttgatgaagaaggca

SEQ ID NO: 1016 - DNA, 19 bp, Homo sapiens
atcttgatgaagaaggcac

SEQ ID NO: 1017 - DNA, 19 bp, Homo sapiens
tcttgatgaagaaggcact

SEQ ID NO: 1018 - DNA, 19 bp, Homo sapiens
cttgatgaagaaggcactg

SEQ ID NO: 1019 - DNA, 19 bp, Homo sapiens
ttgatgaagaaggcactga

SEQ ID NO: 1020 - DNA, 19 bp, Homo sapiens
tgatgaagaaggcactgat

SEQ ID NO: 1021 - DNA, 19 bp, Homo sapiens
gatgaagaaggcactgata

SEQ ID NO: 1022 - DNA, 19 bp, Homo sapiens
atgaagaaggcactgataa

SEQ ID NO: 1023 - DNA, 19 bp, Homo sapiens
tgaagaaggcactgataac

SEQ ID NO: 1024 - DNA, 19 bp, Homo sapiens
gaagaaggcactgataact

SEQ ID NO: 1025 - DNA, 19 bp, Homo sapiens
aagaaggcactgataactg

SEQ ID NO: 1026 - DNA, 19 bp, Homo sapiens
agaaggcactgataactgg

SEQ ID NO: 1027 - DNA, 19 bp, Homo sapiens
gaaggcactgataactggt

SEQ ID NO: 1028 - DNA, 19 bp, Homo sapiens
aaggcactgataactggtt

SEQ ID NO: 1029 - DNA, 19 bp, Homo sapiens
aggcactgataactggttg

SEQ ID NO: 1030 - DNA, 19 bp, Homo sapiens
ggcactgataactggttgg

SEQ ID NO: 1031 - DNA, 19 bp, Homo sapiens
gcactgataactggttggc

SEQ ID NO: 1032 - DNA, 19 bp, Homo sapiens
cactgataactggttggct

SEQ ID NO: 1033 - DNA, 19 bp, Homo sapiens
actgataactggttggctc

SEQ ID NO: 1034 - DNA, 19 bp, Homo sapiens
ctgataactggttggctca

SEQ ID NO: 1035 - DNA, 19 bp, Homo sapiens
tgataactggttggctcaa

SEQ ID NO: 1036 - DNA, 19 bp, Homo sapiens
gataactggttggctcaat

SEQ ID NO: 1037 - DNA, 19 bp, Homo sapiens
ataactggttggctcaata

SEQ ID NO: 1038 - DNA, 19 bp, Homo sapiens
taactggttggctcaatat

SEQ ID NO: 1039 - DNA, 19 bp, Homo sapiens
aactggttggctcaatatt

SEQ ID NO: 1040 - DNA, 19 bp, Homo sapiens
actggttggctcaatattt

SEQ ID NO: 1041 - DNA, 19 bp, Homo sapiens
ctggttggctcaatattta

SEQ ID NO: 1042 - DNA, 19 bp, Homo sapiens
tggttggctcaatatttaa

SEQ ID NO: 1043 - DNA, 19 bp, Homo sapiens
ggttggctcaatatttaat

SEQ ID NO: 1044 - DNA, 19 bp, Homo sapiens
gttggctcaatatttaatt

SEQ ID NO: 1045 - DNA, 19 bp, Homo sapiens
ttggctcaatatttaattc

SEQ ID NO: 1046 - DNA, 19 bp, Homo sapiens
tggctcaatatttaattct

SEQ ID NO: 1047 - DNA, 19 bp, Homo sapiens
ggctcaatatttaattctc

SEQ ID NO: 1048 - DNA, 19 bp, Homo sapiens
gctcaatatttaattctct

SEQ ID NO: 1049 - DNA, 19 bp, Homo sapiens
ctcaatatttaattctctc

SEQ ID NO: 1050 - DNA, 19 bp, Homo sapiens
tcaatatttaattctctct

SEQ ID NO: 1051 - DNA, 19 bp, Homo sapiens
caatatttaattctctctg

SEQ ID NO: 1052 - DNA, 19 bp, Homo sapiens
aatatttaattctctctgg

SEQ ID NO: 1053 - DNA, 19 bp, Homo sapiens
atatttaattctctctgga

SEQ ID NO: 1054 - DNA, 19 bp, Homo sapiens
tatttaattctctctggaa

SEQ ID NO: 1055 - DNA, 19 bp, Homo sapiens
atttaattctctctggaaa

SEQ ID NO: 1056 - DNA, 19 bp, Homo sapiens
tttaattctctctggaaat

SEQ ID NO: 1057 - DNA, 19 bp, Homo sapiens
ttaattctctctggaaatg

SEQ ID NO: 1058 - DNA, 19 bp, Homo sapiens
taattctctctggaaatga

SEQ ID NO: 1059 - DNA, 19 bp, Homo sapiens
aattctctctggaaatgat

SEQ ID NO: 1060 - DNA, 19 bp, Homo sapiens
attctctctggaaatgatg

SEQ ID NO: 1061 - DNA, 19 bp, Homo sapiens
ttctctctggaaatgatgg

SEQ ID NO: 1062 - DNA, 19 bp, Homo sapiens
tctctctggaaatgatggg

SEQ ID NO: 1063 - DNA, 19 bp, Homo sapiens
ctctctggaaatgatggga

SEQ ID NO: 1064 - DNA, 19 bp, Homo sapiens
tctctggaaatgatgggaa

SEQ ID NO: 1065 - DNA, 19 bp, Homo sapiens
ctctggaaatgatgggaat

SEQ ID NO: 1066 - DNA, 19 bp, Homo sapiens
tctggaaatgatgggaatt

SEQ ID NO: 1067 - DNA, 19 bp, Homo sapiens
ctggaaatgatgggaattg

SEQ ID NO: 1068 - DNA, 19 bp, Homo sapiens
tggaaatgatgggaattgg

SEQ ID NO: 1069 - DNA, 19 bp, Homo sapiens
ggaaatgatgggaattggt

SEQ ID NO: 1070 - DNA, 19 bp, Homo sapiens
gaaatgatgggaattggtt

SEQ ID NO: 1071 - DNA, 19 bp, Homo sapiens
aaatgatgggaattggttc

SEQ ID NO: 1072 - DNA, 19 bp, Homo sapiens
aatgatgggaattggttcg

SEQ ID NO: 1073 - DNA, 19 bp, Homo sapiens
atgatgggaattggttcga

SEQ ID NO: 1074 - DNA, 19 bp, Homo sapiens
tgatgggaattggttcgat

SEQ ID NO: 1075 - DNA, 19 bp, Homo sapiens
gatgggaattggttcgata

SEQ ID NO: 1076 - DNA, 19 bp, Homo sapiens
atgggaattggttcgatat

SEQ ID NO: 1077 - DNA, 19 bp, Homo sapiens
tgggaattggttcgatatt

SEQ ID NO: 1078 - DNA, 19 bp, Homo sapiens
gggaattggttcgatattc

SEQ ID NO: 1079 - DNA, 19 bp, Homo sapiens
ggaattggttcgatattca

SEQ ID NO: 1080 - DNA, 19 bp, Homo sapiens
gaattggttcgatattcaa

SEQ ID NO: 1081 - DNA, 19 bp, Homo sapiens
aattggttcgatattcaaa

SEQ ID NO: 1082 - DNA, 19 bp, Homo sapiens
attggttcgatattcaaac

SEQ ID NO: 1083 - DNA, 19 bp, Homo sapiens
ttggttcgatattcaaaca

SEQ ID NO: 1084 - DNA, 19 bp, Homo sapiens
tggttcgatattcaaacag

SEQ ID NO: 1085 - DNA, 19 bp, Homo sapiens
ggttcgatattcaaacaga

SEQ ID NO: 1086 - DNA, 19 bp, Homo sapiens
gttcgatattcaaacagat

SEQ ID NO: 1087 - DNA, 19 bp, Homo sapiens
ttcgatattcaaacagatc

SEQ ID NO: 1088 - DNA, 19 bp, Homo sapiens
tcgatattcaaacagatcc

SEQ ID NO: 1089 - DNA, 19 bp, Homo sapiens
cgatattcaaacagatcca

SEQ ID NO: 1090 - DNA, 19 bp, Homo sapiens
gatattcaaacagatccac

SEQ ID NO: 1091 - DNA, 19 bp, Homo sapiens
atattcaaacagatccaca

SEQ ID NO: 1092 - DNA, 19 bp, Homo sapiens
tattcaaacagatccacaa

SEQ ID NO: 1093 - DNA, 19 bp, Homo sapiens
attcaaacagatccacaaa

SEQ ID NO: 1094 - DNA, 19 bp, Homo sapiens
ttcaaacagatccacaaac

SEQ ID NO: 1095 - DNA, 19 bp, Homo sapiens
tcaaacagatccacaaacc

SEQ ID NO: 1096 - DNA, 19 bp, Homo sapiens
caaacagatccacaaacca

SEQ ID NO: 1097 - DNA, 19 bp, Homo sapiens
aaacagatccacaaaccaa

SEQ ID NO: 1098 - DNA, 19 bp, Homo sapiens
aacagatccacaaaccaat

SEQ ID NO: 1099 - DNA, 19 bp, Homo sapiens
acagatccacaaaccaatg

SEQ ID NO: 1100 - DNA, 19 bp, Homo sapiens
cagatccacaaaccaatga

SEQ ID NO: 1101 - DNA, 19 bp, Homo sapiens
agatccacaaaccaatgaa

SEQ ID NO: 1102 - DNA, 19 bp, Homo sapiens
gatccacaaaccaatgaag

SEQ ID NO: 1103 - DNA, 19 bp, Homo sapiens
atccacaaaccaatgaagg

SEQ ID NO: 1104 - DNA, 19 bp, Homo sapiens
tccacaaaccaatgaaggc

SEQ ID NO: 1105 - DNA, 19 bp, Homo sapiens
ccacaaaccaatgaaggca

SEQ ID NO: 1106 - DNA, 19 bp, Homo sapiens
cacaaaccaatgaaggcat

SEQ ID NO: 1107 - DNA, 19 bp, Homo sapiens
acaaaccaatgaaggcatt

SEQ ID NO: 1108 - DNA, 19 bp, Homo sapiens
caaaccaatgaaggcattt

SEQ ID NO: 1109 - DNA, 19 bp, Homo sapiens
aaaccaatgaaggcatttt

SEQ ID NO: 1110 - DNA, 19 bp, Homo sapiens
aaccaatgaaggcattttg

SEQ ID NO: 1111 - DNA, 19 bp, Homo sapiens
accaatgaaggcattttga

SEQ ID NO: 1112 - DNA, 19 bp, Homo sapiens
ccaatgaaggcattttgaa

SEQ ID NO: 1113 - DNA, 19 bp, Homo sapiens
caatgaaggcattttgaaa

SEQ ID NO: 1114 - DNA, 19 bp, Homo sapiens
aatgaaggcattttgaaag

SEQ ID NO: 1115 - DNA, 19 bp, Homo sapiens
atgaaggcattttgaaagt

SEQ ID NO: 1116 - DNA, 19 bp, Homo sapiens
tgaaggcattttgaaagtt

SEQ ID NO: 1117 - DNA, 19 bp, Homo sapiens
gaaggcattttgaaagttg

SEQ ID NO: 1118 - DNA, 19 bp, Homo sapiens
aaggcattttgaaagttgt

SEQ ID NO: 1119 - DNA, 19 bp, Homo sapiens
aggcattttgaaagttgtc

SEQ ID NO: 1120 - DNA, 19 bp, Homo sapiens
ggcattttgaaagttgtca

SEQ ID NO: 1121 - DNA, 19 bp, Homo sapiens
gcattttgaaagttgtcaa

SEQ ID NO: 1122 - DNA, 19 bp, Homo sapiens
cattttgaaagttgtcaag

SEQ ID NO: 1123 - DNA, 19 bp, Homo sapiens
attttgaaagttgtcaaga

SEQ ID NO: 1124 - DNA, 19 bp, Homo sapiens
ttttgaaagttgtcaagat

SEQ ID NO: 1125 - DNA, 19 bp, Homo sapiens
tttgaaagttgtcaagatg

SEQ ID NO: 1126 - DNA, 19 bp, Homo sapiens
ttgaaagttgtcaagatgc

SEQ ID NO: 1127 - DNA, 19 bp, Homo sapiens
tgaaagttgtcaagatgct

SEQ ID NO: 1128 - DNA, 19 bp, Homo sapiens
gaaagttgtcaagatgctg

SEQ ID NO: 1129 - DNA, 19 bp, Homo sapiens
aaagttgtcaagatgctgg

SEQ ID NO: 1130 - DNA, 19 bp, Homo sapiens
aagttgtcaagatgctgga

SEQ ID NO: 1131 - DNA, 19 bp, Homo sapiens
agttgtcaagatgctggat

SEQ ID NO: 1132 - DNA, 19 bp, Homo sapiens
gttgtcaagatgctggatt

SEQ ID NO: 1133 - DNA, 19 bp, Homo sapiens
ttgtcaagatgctggatta

SEQ ID NO: 1134 - DNA, 19 bp, Homo sapiens
tgtcaagatgctggattat

SEQ ID NO: 1135 - DNA, 19 bp, Homo sapiens
gtcaagatgctggattatg

SEQ ID NO: 1136 - DNA, 19 bp, Homo sapiens
tcaagatgctggattatga

SEQ ID NO: 1137 - DNA, 19 bp, Homo sapiens
caagatgctggattatgaa

SEQ ID NO: 1138 - DNA, 19 bp, Homo sapiens
aagatgctggattatgaac

SEQ ID NO: 1139 - DNA, 19 bp, Homo sapiens
agatgctggattatgaaca

SEQ ID NO: 1140 - DNA, 19 bp, Homo sapiens
gatgctggattatgaacaa

SEQ ID NO: 1141 - DNA, 19 bp, Homo sapiens
atgctggattatgaacaag

SEQ ID NO: 1142 - DNA, 19 bp, Homo sapiens
tgctggattatgaacaagc

SEQ ID NO: 1143 - DNA, 19 bp, Homo sapiens
gctggattatgaacaagca

SEQ ID NO: 1144 - DNA, 19 bp, Homo sapiens
ctggattatgaacaagcac

SEQ ID NO: 1145 - DNA, 19 bp, Homo sapiens
tggattatgaacaagcacc

SEQ ID NO: 1146 - DNA, 19 bp, Homo sapiens
ggattatgaacaagcacct

SEQ ID NO: 1147 - DNA, 19 bp, Homo sapiens
gattatgaacaagcaccta

SEQ ID NO: 1148 - DNA, 19 bp, Homo sapiens
attatgaacaagcacctaa

SEQ ID NO: 1149 - DNA, 19 bp, Homo sapiens
ttatgaacaagcacctaac

SEQ ID NO: 1150 - DNA, 19 bp, Homo sapiens
tatgaacaagcacctaaca

SEQ ID NO: 1151 - DNA, 19 bp, Homo sapiens
atgaacaagcacctaacat

SEQ ID NO: 1152 - DNA, 19 bp, Homo sapiens
tgaacaagcacctaacatt

SEQ ID NO: 1153 - DNA, 19 bp, Homo sapiens
gaacaagcacctaacattc

SEQ ID NO: 1154 - DNA, 19 bp, Homo sapiens
aacaagcacctaacattca

SEQ ID NO: 1155 - DNA, 19 bp, Homo sapiens
acaagcacctaacattcag

SEQ ID NO: 1156 - DNA, 19 bp, Homo sapiens
caagcacctaacattcagc

SEQ ID NO: 1157 - DNA, 19 bp, Homo sapiens
aagcacctaacattcagct

SEQ ID NO: 1158 - DNA, 19 bp, Homo sapiens
agcacctaacattcagctt

SEQ ID NO: 1159 - DNA, 19 bp, Homo sapiens
gcacctaacattcagctta

SEQ ID NO: 1160 - DNA, 19 bp, Homo sapiens
cacctaacattcagcttag

SEQ ID NO: 1161 - DNA, 19 bp, Homo sapiens
acctaacattcagcttagt

SEQ ID NO: 1162 - DNA, 19 bp, Homo sapiens
cctaacattcagcttagta

SEQ ID NO: 1163 - DNA, 19 bp, Homo sapiens
ctaacattcagcttagtat

SEQ ID NO: 1164 - DNA, 19 bp, Homo sapiens
taacattcagcttagtatc

SEQ ID NO: 1165 - DNA, 19 bp, Homo sapiens
aacattcagcttagtatcg

SEQ ID NO: 1166 - DNA, 19 bp, Homo sapiens
acattcagcttagtatcgg

SEQ ID NO: 1167 - DNA, 19 bp, Homo sapiens
cattcagcttagtatcgga

SEQ ID NO: 1168 - DNA, 19 bp, Homo sapiens
attcagcttagtatcggag

SEQ ID NO: 1169 - DNA, 19 bp, Homo sapiens
ttcagcttagtatcggagt

SEQ ID NO: 1170 - DNA, 19 bp, Homo sapiens
tcagcttagtatcggagtt

SEQ ID NO: 1171 - DNA, 19 bp, Homo sapiens
cagcttagtatcggagtta

SEQ ID NO: 1172 - DNA, 19 bp, Homo sapiens
agcttagtatcggagttaa

SEQ ID NO: 1173 - DNA, 19 bp, Homo sapiens
gcttagtatcggagttaaa

SEQ ID NO: 1174 - DNA, 19 bp, Homo sapiens
cttagtatcggagttaaaa

SEQ ID NO: 1175 - DNA, 19 bp, Homo sapiens
ttagtatcggagttaaaaa

SEQ ID NO: 1176 - DNA, 19 bp, Homo sapiens
tagtatcggagttaaaaac

SEQ ID NO: 1177 - DNA, 19 bp, Homo sapiens
agtatcggagttaaaaacc

SEQ ID NO: 1178 - DNA, 19 bp, Homo sapiens
gtatcggagttaaaaacca

SEQ ID NO: 1179 - DNA, 19 bp, Homo sapiens
tatcggagttaaaaaccaa

SEQ ID NO: 1180 - DNA, 19 bp, Homo sapiens
atcggagttaaaaaccaag

SEQ ID NO: 1181 - DNA, 19 bp, Homo sapiens
tcggagttaaaaaccaagc

SEQ ID NO: 1182 - DNA, 19 bp, Homo sapiens
cggagttaaaaaccaagct

SEQ ID NO: 1183 - DNA, 19 bp, Homo sapiens
ggagttaaaaaccaagctg

SEQ ID NO: 1184 - DNA, 19 bp, Homo sapiens
gagttaaaaaccaagctga

SEQ ID NO: 1185 - DNA, 19 bp, Homo sapiens
agttaaaaaccaagctgat

SEQ ID NO: 1186 - DNA, 19 bp, Homo sapiens
gttaaaaaccaagctgatt

SEQ ID NO: 1187 - DNA, 19 bp, Homo sapiens
ttaaaaaccaagctgattt

SEQ ID NO: 1188 - DNA, 19 bp, Homo sapiens
taaaaaccaagctgatttt

SEQ ID NO: 1189 - DNA, 19 bp, Homo sapiens
aaaaaccaagctgattttc

SEQ ID NO: 1190 - DNA, 19 bp, Homo sapiens
aaaaccaagctgattttca

SEQ ID NO: 1191 - DNA, 19 bp, Homo sapiens
aaaccaagctgattttcac

SEQ ID NO: 1192 - DNA, 19 bp, Homo sapiens
aaccaagctgattttcact

SEQ ID NO: 1193 - DNA, 19 bp, Homo sapiens
accaagctgattttcacta

SEQ ID NO: 1194 - DNA, 19 bp, Homo sapiens
ccaagctgattttcactac

SEQ ID NO: 1195 - DNA, 19 bp, Homo sapiens
caagctgattttcactact

SEQ ID NO: 1196 - DNA, 19 bp, Homo sapiens
aagctgattttcactactc

SEQ ID NO: 1197 - DNA, 19 bp, Homo sapiens
agctgattttcactactcc

SEQ ID NO: 1198 - DNA, 19 bp, Homo sapiens
gctgattttcactactccg

SEQ ID NO: 1199 - DNA, 19 bp, Homo sapiens
ctgattttcactactccgt

SEQ ID NO: 1200 - DNA, 19 bp, Homo sapiens
tgattttcactactccgtt

SEQ ID NO: 1201 - DNA, 19 bp, Homo sapiens
gattttcactactccgttg

SEQ ID NO: 1202 - DNA, 19 bp, Homo sapiens
attttcactactccgttgc

SEQ ID NO: 1203 - DNA, 19 bp, Homo sapiens
ttttcactactccgttgct

SEQ ID NO: 1204 - DNA, 19 bp, Homo sapiens
tttcactactccgttgctt

SEQ ID NO: 1205 - DNA, 19 bp, Homo sapiens
ttcactactccgttgcttc

SEQ ID NO: 1206 - DNA, 19 bp, Homo sapiens
tcactactccgttgcttct

SEQ ID NO: 1207 - DNA, 19 bp, Homo sapiens
cactactccgttgcttctc

SEQ ID NO: 1208 - DNA, 19 bp, Homo sapiens
actactccgttgcttctca

SEQ ID NO: 1209 - DNA, 19 bp, Homo sapiens
ctactccgttgcttctcaa

SEQ ID NO: 1210 - DNA, 19 bp, Homo sapiens
tactccgttgcttctcaat

SEQ ID NO: 1211 - DNA, 19 bp, Homo sapiens
actccgttgcttctcaatt

SEQ ID NO: 1212 - DNA, 19 bp, Homo sapiens
ctccgttgcttctcaattc

SEQ ID NO: 1213 - DNA, 19 bp, Homo sapiens
tccgttgcttctcaattcc

SEQ ID NO: 1214 - DNA, 19 bp, Homo sapiens
ccgttgcttctcaattcca

SEQ ID NO: 1215 - DNA, 19 bp, Homo sapiens
cgttgcttctcaattccaa

SEQ ID NO: 1216 - DNA, 19 bp, Homo sapiens
gttgcttctcaattccaaa

SEQ ID NO: 1217 - DNA, 19 bp, Homo sapiens
ttgcttctcaattccaaat

SEQ ID NO: 1218 - DNA, 19 bp, Homo sapiens
tgcttctcaattccaaatg

SEQ ID NO: 1219 - DNA, 19 bp, Homo sapiens
gcttctcaattccaaatgc

SEQ ID NO: 1220 - DNA, 19 bp, Homo sapiens
cttctcaattccaaatgca

SEQ ID NO: 1221 - DNA, 19 bp, Homo sapiens
ttctcaattccaaatgcac

SEQ ID NO: 1222 - DNA, 19 bp, Homo sapiens
tctcaattccaaatgcacc

SEQ ID NO: 1223 - DNA, 19 bp, Homo sapiens
ctcaattccaaatgcaccc

SEQ ID NO: 1224 - DNA, 19 bp, Homo sapiens
tcaattccaaatgcaccca

SEQ ID NO: 1225 - DNA, 19 bp, Homo sapiens
caattccaaatgcacccaa

SEQ ID NO: 1226 - DNA, 19 bp, Homo sapiens
aattccaaatgcacccaac

SEQ ID NO: 1227 - DNA, 19 bp, Homo sapiens
attccaaatgcacccaacc

SEQ ID NO: 1228 - DNA, 19 bp, Homo sapiens
ttccaaatgcacccaaccc

SEQ ID NO: 1229 - DNA, 19 bp, Homo sapiens
tccaaatgcacccaacccc

SEQ ID NO: 1230 - DNA, 19 bp, Homo sapiens
ccaaatgcacccaacccct

SEQ ID NO: 1231 - DNA, 19 bp, Homo sapiens
caaatgcacccaacccctg

SEQ ID NO: 1232 - DNA, 19 bp, Homo sapiens
aaatgcacccaacccctgt

SEQ ID NO: 1233 - DNA, 19 bp, Homo sapiens
aatgcacccaacccctgtg

SEQ ID NO: 1234 - DNA, 19 bp, Homo sapiens
atgcacccaacccctgtga

SEQ ID NO: 1235 - DNA, 19 bp, Homo sapiens
tgcacccaacccctgtgag

SEQ ID NO: 1236 - DNA, 19 bp, Homo sapiens
gcacccaacccctgtgaga

SEQ ID NO: 1237 - DNA, 19 bp, Homo sapiens
cacccaacccctgtgagaa

SEQ ID NO: 1238 - DNA, 19 bp, Homo sapiens
acccaacccctgtgagaat

SEQ ID NO: 1239 - DNA, 19 bp, Homo sapiens
cccaacccctgtgagaatt

SEQ ID NO: 1240 - DNA, 19 bp, Homo sapiens
ccaacccctgtgagaattc

SEQ ID NO: 1241 - DNA, 19 bp, Homo sapiens
caacccctgtgagaattca

SEQ ID NO: 1242 - DNA, 19 bp, Homo sapiens
aacccctgtgagaattcaa

SEQ ID NO: 1243 - DNA, 19 bp, Homo sapiens
acccctgtgagaattcaag

SEQ ID NO: 1244 - DNA, 19 bp, Homo sapiens
cccctgtgagaattcaagt

SEQ ID NO: 1245 - DNA, 19 bp, Homo sapiens
ccctgtgagaattcaagtt

SEQ ID NO: 1246 - DNA, 19 bp, Homo sapiens
cctgtgagaattcaagttg

SEQ ID NO: 1247 - DNA, 19 bp, Homo sapiens
ctgtgagaattcaagttgt

SEQ ID NO: 1248 - DNA, 19 bp, Homo sapiens
tgtgagaattcaagttgtt

SEQ ID NO: 1249 - DNA, 19 bp, Homo sapiens
gtgagaattcaagttgttg

SEQ ID NO: 1250 - DNA, 19 bp, Homo sapiens
tgagaattcaagttgttga

SEQ ID NO: 1251 - DNA, 19 bp, Homo sapiens
gagaattcaagttgttgat

SEQ ID NO: 1252 - DNA, 19 bp, Homo sapiens
agaattcaagttgttgatg

SEQ ID NO: 1253 - DNA, 19 bp, Homo sapiens
gaattcaagttgttgatgt

SEQ ID NO: 1254 - DNA, 19 bp, Homo sapiens
aattcaagttgttgatgtg

SEQ ID NO: 1255 - DNA, 19 bp, Homo sapiens
attcaagttgttgatgtga

SEQ ID NO: 1256 - DNA, 19 bp, Homo sapiens
ttcaagttgttgatgtgag

SEQ ID NO: 1257 - DNA, 19 bp, Homo sapiens
tcaagttgttgatgtgaga

SEQ ID NO: 1258 - DNA, 19 bp, Homo sapiens
caagttgttgatgtgagag

SEQ ID NO: 1259 - DNA, 19 bp, Homo sapiens
aagttgttgatgtgagaga

SEQ ID NO: 1260 - DNA, 19 bp, Homo sapiens
agttgttgatgtgagagaa

SEQ ID NO: 1261 - DNA, 19 bp, Homo sapiens
gttgttgatgtgagagaag

SEQ ID NO: 1262 - DNA, 19 bp, Homo sapiens
ttgttgatgtgagagaagg

SEQ ID NO: 1263 - DNA, 19 bp, Homo sapiens
tgttgatgtgagagaagga

SEQ ID NO: 1264 - DNA, 19 bp, Homo sapiens
gttgatgtgagagaaggac

SEQ ID NO: 1265 - DNA, 19 bp, Homo sapiens
ttgatgtgagagaaggacc

SEQ ID NO: 1266 - DNA, 19 bp, Homo sapiens
tgatgtgagagaaggacct

SEQ ID NO: 1267 - DNA, 19 bp, Homo sapiens
gatgtgagagaaggacctg

SEQ ID NO: 1268 - DNA, 19 bp, Homo sapiens
atgtgagagaaggacctgc

SEQ ID NO: 1269 - DNA, 19 bp, Homo sapiens
tgtgagagaaggacctgca

SEQ ID NO: 1270 - DNA, 19 bp, Homo sapiens
gtgagagaaggacctgcat

SEQ ID NO: 1271 - DNA, 19 bp, Homo sapiens
tgagagaaggacctgcatt

SEQ ID NO: 1272 - DNA, 19 bp, Homo sapiens
gagagaaggacctgcattt

SEQ ID NO: 1273 - DNA, 19 bp, Homo sapiens
agagaaggacctgcatttc

SEQ ID NO: 1274 - DNA, 19 bp, Homo sapiens
gagaaggacctgcatttca

SEQ ID NO: 1275 - DNA, 19 bp, Homo sapiens
agaaggacctgcatttcat

SEQ ID NO: 1276 - DNA, 19 bp, Homo sapiens
gaaggacctgcatttcatc

SEQ ID NO: 1277 - DNA, 19 bp, Homo sapiens
aaggacctgcatttcatcc

SEQ ID NO: 1278 - DNA, 19 bp, Homo sapiens
aggacctgcatttcatcca

SEQ ID NO: 1279 - DNA, 19 bp, Homo sapiens
ggacctgcatttcatccaa

SEQ ID NO: 1280 - DNA, 19 bp, Homo sapiens
gacctgcatttcatccaag

SEQ ID NO: 1281 - DNA, 19 bp, Homo sapiens
acctgcatttcatccaagt

SEQ ID NO: 1282 - DNA, 19 bp, Homo sapiens
cctgcatttcatccaagta

SEQ ID NO: 1283 - DNA, 19 bp, Homo sapiens
ctgcatttcatccaagtac

SEQ ID NO: 1284 - DNA, 19 bp, Homo sapiens
tgcatttcatccaagtact

SEQ ID NO: 1285 - DNA, 19 bp, Homo sapiens
gcatttcatccaagtacta

SEQ ID NO: 1286 - DNA, 19 bp, Homo sapiens
catttcatccaagtactat

SEQ ID NO: 1287 - DNA, 19 bp, Homo sapiens
atttcatccaagtactatg

SEQ ID NO: 1288 - DNA, 19 bp, Homo sapiens
tttcatccaagtactatgg

SEQ ID NO: 1289 - DNA, 19 bp, Homo sapiens
ttcatccaagtactatggc

SEQ ID NO: 1290 - DNA, 19 bp, Homo sapiens
tcatccaagtactatggct

SEQ ID NO: 1291 - DNA, 19 bp, Homo sapiens
catccaagtactatggctt

SEQ ID NO: 1292 - DNA, 19 bp, Homo sapiens
atccaagtactatggcttt

SEQ ID NO: 1293 - DNA, 19 bp, Homo sapiens
tccaagtactatggctttt

SEQ ID NO: 1294 - DNA, 19 bp, Homo sapiens
ccaagtactatggctttta

SEQ ID NO: 1295 - DNA, 19 bp, Homo sapiens
caagtactatggcttttag

SEQ ID NO: 1296 - DNA, 19 bp, Homo sapiens
aagtactatggcttttagt

SEQ ID NO: 1297 - DNA, 19 bp, Homo sapiens
agtactatggcttttagtg

SEQ ID NO: 1298 - DNA, 19 bp, Homo sapiens
gtactatggcttttagtgt

SEQ ID NO: 1299 - DNA, 19 bp, Homo sapiens
tactatggcttttagtgtg

SEQ ID NO: 1300 - DNA, 19 bp, Homo sapiens
actatggcttttagtgtgc

SEQ ID NO: 1301 - DNA, 19 bp, Homo sapiens
ctatggcttttagtgtgcg

SEQ ID NO: 1302 - DNA, 19 bp, Homo sapiens
tatggcttttagtgtgcgg

SEQ ID NO: 1303 - DNA, 19 bp, Homo sapiens
atggcttttagtgtgcggg

SEQ ID NO: 1304 - DNA, 19 bp, Homo sapiens
tggcttttagtgtgcggga

SEQ ID NO: 1305 - DNA, 19 bp, Homo sapiens
ggcttttagtgtgcgggaa

SEQ ID NO: 1306 - DNA, 19 bp, Homo sapiens
gcttttagtgtgcgggaag

SEQ ID NO: 1307 - DNA, 19 bp, Homo sapiens
cttttagtgtgcgggaagg

SEQ ID NO: 1308 - DNA, 19 bp, Homo sapiens
ttttagtgtgcgggaagga

SEQ ID NO: 1309 - DNA, 19 bp, Homo sapiens
tttagtgtgcgggaaggaa

SEQ ID NO: 1310 - DNA, 19 bp, Homo sapiens
ttagtgtgcgggaaggaat

SEQ ID NO: 1311 - DNA, 19 bp, Homo sapiens
tagtgtgcgggaaggaata

SEQ ID NO: 1312 - DNA, 19 bp, Homo sapiens
agtgtgcgggaaggaataa

SEQ ID NO: 1313 - DNA, 19 bp, Homo sapiens
gtgtgcgggaaggaataaa

SEQ ID NO: 1314 - DNA, 19 bp, Homo sapiens
tgtgcgggaaggaataaaa

SEQ ID NO: 1315 - DNA, 19 bp, Homo sapiens
gtgcgggaaggaataaaag

SEQ ID NO: 1316 - DNA, 19 bp, Homo sapiens
tgcgggaaggaataaaagg

SEQ ID NO: 1317 - DNA, 19 bp, Homo sapiens
gcgggaaggaataaaagga

SEQ ID NO: 1318 - DNA, 19 bp, Homo sapiens
cgggaaggaataaaaggaa

SEQ ID NO: 1319 - DNA, 19 bp, Homo sapiens
gggaaggaataaaaggaag

SEQ ID NO: 1320 - DNA, 19 bp, Homo sapiens
ggaaggaataaaaggaagt

SEQ ID NO: 1321 - DNA, 19 bp, Homo sapiens
gaaggaataaaaggaagtt

SEQ ID NO: 1322 - DNA, 19 bp, Homo sapiens
aaggaataaaaggaagttc

SEQ ID NO: 1323 - DNA, 19 bp, Homo sapiens
aggaataaaaggaagttcc

SEQ ID NO: 1324 - DNA, 19 bp, Homo sapiens
ggaataaaaggaagttcct

SEQ ID NO: 1325 - DNA, 19 bp, Homo sapiens
gaataaaaggaagttcctt

SEQ ID NO: 1326 - DNA, 19 bp, Homo sapiens
aataaaaggaagttcctta

SEQ ID NO: 1327 - DNA, 19 bp, Homo sapiens
ataaaaggaagttccttat

SEQ ID NO: 1328 - DNA, 19 bp, Homo sapiens
taaaaggaagttccttatt

SEQ ID NO: 1329 - DNA, 19 bp, Homo sapiens
aaaaggaagttccttattg

SEQ ID NO: 1330 - DNA, 19 bp, Homo sapiens
aaaggaagttccttattga

SEQ ID NO: 1331 - DNA, 19 bp, Homo sapiens
aaggaagttccttattgaa

SEQ ID NO: 1332 - DNA, 19 bp, Homo sapiens
aggaagttccttattgaat

SEQ ID NO: 1333 - DNA, 19 bp, Homo sapiens
ggaagttccttattgaatt

SEQ ID NO: 1334 - DNA, 19 bp, Homo sapiens
gaagttccttattgaatta

SEQ ID NO: 1335 - DNA, 19 bp, Homo sapiens
aagttccttattgaattat

SEQ ID NO: 1336 - DNA, 19 bp, Homo sapiens
agttccttattgaattatg

SEQ ID NO: 1337 - DNA, 19 bp, Homo sapiens
gttccttattgaattatgt

SEQ ID NO: 1338 - DNA, 19 bp, Homo sapiens
ttccttattgaattatgtg

SEQ ID NO: 1339 - DNA, 19 bp, Homo sapiens
tccttattgaattatgtgc

SEQ ID NO: 1340 - DNA, 19 bp, Homo sapiens
ccttattgaattatgtgct

SEQ ID NO: 1341 - DNA, 19 bp, Homo sapiens
cttattgaattatgtgctt

SEQ ID NO: 1342 - DNA, 19 bp, Homo sapiens
ttattgaattatgtgcttg

SEQ ID NO: 1343 - DNA, 19 bp, Homo sapiens
tattgaattatgtgcttgg

SEQ ID NO: 1344 - DNA, 19 bp, Homo sapiens
attgaattatgtgcttggc

SEQ ID NO: 1345 - DNA, 19 bp, Homo sapiens
ttgaattatgtgcttggca

SEQ ID NO: 1346 - DNA, 19 bp, Homo sapiens
tgaattatgtgcttggcac

SEQ ID NO: 1347 - DNA, 19 bp, Homo sapiens
gaattatgtgcttggcaca

SEQ ID NO: 1348 - DNA, 19 bp, Homo sapiens
aattatgtgcttggcacat

SEQ ID NO: 1349 - DNA, 19 bp, Homo sapiens
attatgtgcttggcacata

SEQ ID NO: 1350 - DNA, 19 bp, Homo sapiens
ttatgtgcttggcacatat

SEQ ID NO: 1351 - DNA, 19 bp, Homo sapiens
tatgtgcttggcacatata

SEQ ID NO: 1352 - DNA, 19 bp, Homo sapiens
atgtgcttggcacatatac

SEQ ID NO: 1353 - DNA, 19 bp, Homo sapiens
tgtgcttggcacatataca

SEQ ID NO: 1354 - DNA, 19 bp, Homo sapiens
gtgcttggcacatatacag

SEQ ID NO: 1355 - DNA, 19 bp, Homo sapiens
tgcttggcacatatacagc

SEQ ID NO: 1356 - DNA, 19 bp, Homo sapiens
gcttggcacatatacagcc

SEQ ID NO: 1357 - DNA, 19 bp, Homo sapiens
cttggcacatatacagcca

SEQ ID NO: 1358 - DNA, 19 bp, Homo sapiens
ttggcacatatacagccat

SEQ ID NO: 1359 - DNA, 19 bp, Homo sapiens
tggcacatatacagccata

SEQ ID NO: 1360 - DNA, 19 bp, Homo sapiens
ggcacatatacagccatag

SEQ ID NO: 1361 - DNA, 19 bp, Homo sapiens
gcacatatacagccataga

SEQ ID NO: 1362 - DNA, 19 bp, Homo sapiens
cacatatacagccatagat

SEQ ID NO: 1363 - DNA, 19 bp, Homo sapiens
acatatacagccatagatt

SEQ ID NO: 1364 - DNA, 19 bp, Homo sapiens
catatacagccatagattt

SEQ ID NO: 1365 - DNA, 19 bp, Homo sapiens
atatacagccatagatttg

SEQ ID NO: 1366 - DNA, 19 bp, Homo sapiens
tatacagccatagatttgg

SEQ ID NO: 1367 - DNA, 19 bp, Homo sapiens
atacagccatagatttgga

SEQ ID NO: 1368 - DNA, 19 bp, Homo sapiens
tacagccatagatttggac

SEQ ID NO: 1369 - DNA, 19 bp, Homo sapiens
acagccatagatttggaca

SEQ ID NO: 1370 - DNA, 19 bp, Homo sapiens
cagccatagatttggacac

SEQ ID NO: 1371 - DNA, 19 bp, Homo sapiens
agccatagatttggacaca

SEQ ID NO: 1372 - DNA, 19 bp, Homo sapiens
gccatagatttggacacag

SEQ ID NO: 1373 - DNA, 19 bp, Homo sapiens
ccatagatttggacacagg

SEQ ID NO: 1374 - DNA, 19 bp, Homo sapiens
catagatttggacacagga

SEQ ID NO: 1375 - DNA, 19 bp, Homo sapiens
atagatttggacacaggaa

SEQ ID NO: 1376 - DNA, 19 bp, Homo sapiens
tagatttggacacaggaaa

SEQ ID NO: 1377 - DNA, 19 bp, Homo sapiens
agatttggacacaggaaac

SEQ ID NO: 1378 - DNA, 19 bp, Homo sapiens
gatttggacacaggaaacc

SEQ ID NO: 1379 - DNA, 19 bp, Homo sapiens
atttggacacaggaaaccc

SEQ ID NO: 1380 - DNA, 19 bp, Homo sapiens
tttggacacaggaaaccct

SEQ ID NO: 1381 - DNA, 19 bp, Homo sapiens
ttggacacaggaaaccctg

SEQ ID NO: 1382 - DNA, 19 bp, Homo sapiens
tggacacaggaaaccctgc

SEQ ID NO: 1383 - DNA, 19 bp, Homo sapiens
ggacacaggaaaccctgca

SEQ ID NO: 1384 - DNA, 19 bp, Homo sapiens
gacacaggaaaccctgcaa

SEQ ID NO: 1385 - DNA, 19 bp, Homo sapiens
acacaggaaaccctgcaac

SEQ ID NO: 1386 - DNA, 19 bp, Homo sapiens
cacaggaaaccctgcaaca

SEQ ID NO: 1387 - DNA, 19 bp, Homo sapiens
acaggaaaccctgcaacag

SEQ ID NO: 1388 - DNA, 19 bp, Homo sapiens
caggaaaccctgcaacaga

SEQ ID NO: 1389 - DNA, 19 bp, Homo sapiens
aggaaaccctgcaacagat

SEQ ID NO: 1390 - DNA, 19 bp, Homo sapiens
ggaaaccctgcaacagatg

SEQ ID NO: 1391 - DNA, 19 bp, Homo sapiens
gaaaccctgcaacagatgt

SEQ ID NO: 1392 - DNA, 19 bp, Homo sapiens
aaaccctgcaacagatgtc

SEQ ID NO: 1393 - DNA, 19 bp, Homo sapiens
aaccctgcaacagatgtca

SEQ ID NO: 1394 - DNA, 19 bp, Homo sapiens
accctgcaacagatgtcag

SEQ ID NO: 1395 - DNA, 19 bp, Homo sapiens
ccctgcaacagatgtcaga

SEQ ID NO: 1396 - DNA, 19 bp, Homo sapiens
cctgcaacagatgtcagat

SEQ ID NO: 1397 - DNA, 19 bp, Homo sapiens
ctgcaacagatgtcagata

SEQ ID NO: 1398 - DNA, 19 bp, Homo sapiens
tgcaacagatgtcagatat

SEQ ID NO: 1399 - DNA, 19 bp, Homo sapiens
gcaacagatgtcagatata

SEQ ID NO: 1400 - DNA, 19 bp, Homo sapiens
caacagatgtcagatatat

SEQ ID NO: 1401 - DNA, 19 bp, Homo sapiens
aacagatgtcagatatatc

SEQ ID NO: 1402 - DNA, 19 bp, Homo sapiens
acagatgtcagatatatca

SEQ ID NO: 1403 - DNA, 19 bp, Homo sapiens
cagatgtcagatatatcat

SEQ ID NO: 1404 - DNA, 19 bp, Homo sapiens
agatgtcagatatatcata

SEQ ID NO: 1405 - DNA, 19 bp, Homo sapiens
gatgtcagatatatcatag

SEQ ID NO: 1406 - DNA, 19 bp, Homo sapiens
atgtcagatatatcatagg

SEQ ID NO: 1407 - DNA, 19 bp, Homo sapiens
tgtcagatatatcataggg

SEQ ID NO: 1408 - DNA, 19 bp, Homo sapiens
gtcagatatatcatagggc

SEQ ID NO: 1409 - DNA, 19 bp, Homo sapiens
tcagatatatcatagggca

SEQ ID NO: 1410 - DNA, 19 bp, Homo sapiens
cagatatatcatagggcat

SEQ ID NO: 1411 - DNA, 19 bp, Homo sapiens
agatatatcatagggcatg

SEQ ID NO: 1412 - DNA, 19 bp, Homo sapiens
gatatatcatagggcatga

SEQ ID NO: 1413 - DNA, 19 bp, Homo sapiens
atatatcatagggcatgat

SEQ ID NO: 1414 - DNA, 19 bp, Homo sapiens
tatatcatagggcatgatg

SEQ ID NO: 1415 - DNA, 19 bp, Homo sapiens
atatcatagggcatgatgc

SEQ ID NO: 1416 - DNA, 19 bp, Homo sapiens
tatcatagggcatgatgca

SEQ ID NO: 1417 - DNA, 19 bp, Homo sapiens
atcatagggcatgatgcag

SEQ ID NO: 1418 - DNA, 19 bp, Homo sapiens
tcatagggcatgatgcagg

SEQ ID NO: 1419 - DNA, 19 bp, Homo sapiens
catagggcatgatgcaggc

SEQ ID NO: 1420 - DNA, 19 bp, Homo sapiens
atagggcatgatgcaggca

SEQ ID NO: 1421 - DNA, 19 bp, Homo sapiens
tagggcatgatgcaggcag

SEQ ID NO: 1422 - DNA, 19 bp, Homo sapiens
agggcatgatgcaggcagc

SEQ ID NO: 1423 - DNA, 19 bp, Homo sapiens
gggcatgatgcaggcagct

SEQ ID NO: 1424 - DNA, 19 bp, Homo sapiens
ggcatgatgcaggcagctg

SEQ ID NO: 1425 - DNA, 19 bp, Homo sapiens
gcatgatgcaggcagctgg

SEQ ID NO: 1426 - DNA, 19 bp, Homo sapiens
catgatgcaggcagctggt

SEQ ID NO: 1427 - DNA, 19 bp, Homo sapiens
atgatgcaggcagctggtt

SEQ ID NO: 1428 - DNA, 19 bp, Homo sapiens
tgatgcaggcagctggtta

SEQ ID NO: 1429 - DNA, 19 bp, Homo sapiens
gatgcaggcagctggttaa

SEQ ID NO: 1430 - DNA, 19 bp, Homo sapiens
atgcaggcagctggttaaa

SEQ ID NO: 1431 - DNA, 19 bp, Homo sapiens
tgcaggcagctggttaaaa

SEQ ID NO: 1432 - DNA, 19 bp, Homo sapiens
gcaggcagctggttaaaaa

SEQ ID NO: 1433 - DNA, 19 bp, Homo sapiens
caggcagctggttaaaaat

SEQ ID NO: 1434 - DNA, 19 bp, Homo sapiens
aggcagctggttaaaaatt

SEQ ID NO: 1435 - DNA, 19 bp, Homo sapiens
ggcagctggttaaaaattg

SEQ ID NO: 1436 - DNA, 19 bp, Homo sapiens
gcagctggttaaaaattga

SEQ ID NO: 1437 - DNA, 19 bp, Homo sapiens
cagctggttaaaaattgat

SEQ ID NO: 1438 - DNA, 19 bp, Homo sapiens
agctggttaaaaattgatt

SEQ ID NO: 1439 - DNA, 19 bp, Homo sapiens
gctggttaaaaattgattc

SEQ ID NO: 1440 - DNA, 19 bp, Homo sapiens
ctggttaaaaattgattca

SEQ ID NO: 1441 - DNA, 19 bp, Homo sapiens
tggttaaaaattgattcaa

SEQ ID NO: 1442 - DNA, 19 bp, Homo sapiens
ggttaaaaattgattcaag

SEQ ID NO: 1443 - DNA, 19 bp, Homo sapiens
gttaaaaattgattcaaga

SEQ ID NO: 1444 - DNA, 19 bp, Homo sapiens
ttaaaaattgattcaagaa

SEQ ID NO: 1445 - DNA, 19 bp, Homo sapiens
taaaaattgattcaagaac

SEQ ID NO: 1446 - DNA, 19 bp, Homo sapiens
aaaaattgattcaagaact

SEQ ID NO: 1447 - DNA, 19 bp, Homo sapiens
aaaattgattcaagaactg

SEQ ID NO: 1448 - DNA, 19 bp, Homo sapiens
aaattgattcaagaactgg

SEQ ID NO: 1449 - DNA, 19 bp, Homo sapiens
aattgattcaagaactggt

SEQ ID NO: 1450 - DNA, 19 bp, Homo sapiens
attgattcaagaactggtg

SEQ ID NO: 1451 - DNA, 19 bp, Homo sapiens
ttgattcaagaactggtga

SEQ ID NO: 1452 - DNA, 19 bp, Homo sapiens
tgattcaagaactggtgag

SEQ ID NO: 1453 - DNA, 19 bp, Homo sapiens
gattcaagaactggtgaga

SEQ ID NO: 1454 - DNA, 19 bp, Homo sapiens
attcaagaactggtgagat

SEQ ID NO: 1455 - DNA, 19 bp, Homo sapiens
ttcaagaactggtgagata

SEQ ID NO: 1456 - DNA, 19 bp, Homo sapiens
tcaagaactggtgagatac

SEQ ID NO: 1457 - DNA, 19 bp, Homo sapiens
caagaactggtgagataca

SEQ ID NO: 1458 - DNA, 19 bp, Homo sapiens
aagaactggtgagatacaa

SEQ ID NO: 1459 - DNA, 19 bp, Homo sapiens
agaactggtgagatacaat

SEQ ID NO: 1460 - DNA, 19 bp, Homo sapiens
gaactggtgagatacaatt

SEQ ID NO: 1461 - DNA, 19 bp, Homo sapiens
aactggtgagatacaattt

SEQ ID NO: 1462 - DNA, 19 bp, Homo sapiens
actggtgagatacaatttt

SEQ ID NO: 1463 - DNA, 19 bp, Homo sapiens
ctggtgagatacaattttc

SEQ ID NO: 1464 - DNA, 19 bp, Homo sapiens
tggtgagatacaattttct

SEQ ID NO: 1465 - DNA, 19 bp, Homo sapiens
ggtgagatacaattttcta

SEQ ID NO: 1466 - DNA, 19 bp, Homo sapiens
gtgagatacaattttctag

SEQ ID NO: 1467 - DNA, 19 bp, Homo sapiens
tgagatacaattttctaga

SEQ ID NO: 1468 - DNA, 19 bp, Homo sapiens
gagatacaattttctagag

SEQ ID NO: 1469 - DNA, 19 bp, Homo sapiens
agatacaattttctagaga

SEQ ID NO: 1470 - DNA, 19 bp, Homo sapiens
gatacaattttctagagaa

SEQ ID NO: 1471 - DNA, 19 bp, Homo sapiens
atacaattttctagagaat

SEQ ID NO: 1472 - DNA, 19 bp, Homo sapiens
tacaattttctagagaatt

SEQ ID NO: 1473 - DNA, 19 bp, Homo sapiens
acaattttctagagaattt

SEQ ID NO: 1474 - DNA, 19 bp, Homo sapiens
caattttctagagaatttg

SEQ ID NO: 1475 - DNA, 19 bp, Homo sapiens
aattttctagagaatttga

SEQ ID NO: 1476 - DNA, 19 bp, Homo sapiens
attttctagagaatttgat

SEQ ID NO: 1477 - DNA, 19 bp, Homo sapiens
ttttctagagaatttgata

SEQ ID NO: 1478 - DNA, 19 bp, Homo sapiens
tttctagagaatttgataa

SEQ ID NO: 1479 - DNA, 19 bp, Homo sapiens
ttctagagaatttgataag

SEQ ID NO: 1480 - DNA, 19 bp, Homo sapiens
tctagagaatttgataaga

SEQ ID NO: 1481 - DNA, 19 bp, Homo sapiens
ctagagaatttgataagaa

SEQ ID NO: 1482 - DNA, 19 bp, Homo sapiens
tagagaatttgataagaag

SEQ ID NO: 1483 - DNA, 19 bp, Homo sapiens
agagaatttgataagaagt

SEQ ID NO: 1484 - DNA, 19 bp, Homo sapiens
gagaatttgataagaagtc

SEQ ID NO: 1485 - DNA, 19 bp, Homo sapiens
agaatttgataagaagtca

SEQ ID NO: 1486 - DNA, 19 bp, Homo sapiens
gaatttgataagaagtcaa

SEQ ID NO: 1487 - DNA, 19 bp, Homo sapiens
aatttgataagaagtcaaa

SEQ ID NO: 1488 - DNA, 19 bp, Homo sapiens
atttgataagaagtcaaaa

SEQ ID NO: 1489 - DNA, 19 bp, Homo sapiens
tttgataagaagtcaaaat

SEQ ID NO: 1490 - DNA, 19 bp, Homo sapiens
ttgataagaagtcaaaata

SEQ ID NO: 1491 - DNA, 19 bp, Homo sapiens
tgataagaagtcaaaatat

SEQ ID NO: 1492 - DNA, 19 bp, Homo sapiens
gataagaagtcaaaatata

SEQ ID NO: 1493 - DNA, 19 bp, Homo sapiens
ataagaagtcaaaatatat

SEQ ID NO: 1494 - DNA, 19 bp, Homo sapiens
taagaagtcaaaatatatt

SEQ ID NO: 1495 - DNA, 19 bp, Homo sapiens
aagaagtcaaaatatatta

SEQ ID NO: 1496 - DNA, 19 bp, Homo sapiens
agaagtcaaaatatattat

SEQ ID NO: 1497 - DNA, 19 bp, Homo sapiens
gaagtcaaaatatattatc

SEQ ID NO: 1498 - DNA, 19 bp, Homo sapiens
aagtcaaaatatattatca

SEQ ID NO: 1499 - DNA, 19 bp, Homo sapiens
agtcaaaatatattatcaa

SEQ ID NO: 1500 - DNA, 19 bp, Homo sapiens
gtcaaaatatattatcaat

SEQ ID NO: 1501 - DNA, 19 bp, Homo sapiens
tcaaaatatattatcaatg

SEQ ID NO: 1502 - DNA, 19 bp, Homo sapiens
caaaatatattatcaatgg

SEQ ID NO: 1503 - DNA, 19 bp, Homo sapiens
aaaatatattatcaatggg

SEQ ID NO: 1504 - DNA, 19 bp, Homo sapiens
aaatatattatcaatggga

SEQ ID NO: 1505 - DNA, 19 bp, Homo sapiens
aatatattatcaatgggat

SEQ ID NO: 1506 - DNA, 19 bp, Homo sapiens
atatattatcaatgggata

SEQ ID NO: 1507 - DNA, 19 bp, Homo sapiens
tatattatcaatgggatat

SEQ ID NO: 1508 - DNA, 19 bp, Homo sapiens
atattatcaatgggatata

SEQ ID NO: 1509 - DNA, 19 bp, Homo sapiens
tattatcaatgggatatac

SEQ ID NO: 1510 - DNA, 19 bp, Homo sapiens
attatcaatgggatataca

SEQ ID NO: 1511 - DNA, 19 bp, Homo sapiens
ttatcaatgggatatacac

SEQ ID NO: 1512 - DNA, 19 bp, Homo sapiens
tatcaatgggatatacaca

SEQ ID NO: 1513 - DNA, 19 bp, Homo sapiens
atcaatgggatatacacag

SEQ ID NO: 1514 - DNA, 19 bp, Homo sapiens
tcaatgggatatacacagc

SEQ ID NO: 1515 - DNA, 19 bp, Homo sapiens
caatgggatatacacagca

SEQ ID NO: 1516 - DNA, 19 bp, Homo sapiens
aatgggatatacacagcag

SEQ ID NO: 1517 - DNA, 19 bp, Homo sapiens
atgggatatacacagcaga

SEQ ID NO: 1518 - DNA, 19 bp, Homo sapiens
tgggatatacacagcagag

SEQ ID NO: 1519 - DNA, 19 bp, Homo sapiens
gggatatacacagcagaga

SEQ ID NO: 1520 - DNA, 19 bp, Homo sapiens
ggatatacacagcagagat

SEQ ID NO: 1521 - DNA, 19 bp, Homo sapiens
gatatacacagcagagatc

SEQ ID NO: 1522 - DNA, 19 bp, Homo sapiens
atatacacagcagagatcc

SEQ ID NO: 1523 - DNA, 19 bp, Homo sapiens
tatacacagcagagatcct

SEQ ID NO: 1524 - DNA, 19 bp, Homo sapiens
atacacagcagagatcctg

SEQ ID NO: 1525 - DNA, 19 bp, Homo sapiens
tacacagcagagatcctgg

SEQ ID NO: 1526 - DNA, 19 bp, Homo sapiens
acacagcagagatcctggc

SEQ ID NO: 1527 - DNA, 19 bp, Homo sapiens
cacagcagagatcctggct

SEQ ID NO: 1528 - DNA, 19 bp, Homo sapiens
acagcagagatcctggcta

SEQ ID NO: 1529 - DNA, 19 bp, Homo sapiens
cagcagagatcctggctat

SEQ ID NO: 1530 - DNA, 19 bp, Homo sapiens
agcagagatcctggctata

SEQ ID NO: 1531 - DNA, 19 bp, Homo sapiens
gcagagatcctggctatag

SEQ ID NO: 1532 - DNA, 19 bp, Homo sapiens
cagagatcctggctataga

SEQ ID NO: 1533 - DNA, 19 bp, Homo sapiens
agagatcctggctatagat

SEQ ID NO: 1534 - DNA, 19 bp, Homo sapiens
gagatcctggctatagatg

SEQ ID NO: 1535 - DNA, 19 bp, Homo sapiens
agatcctggctatagatga

SEQ ID NO: 1536 - DNA, 19 bp, Homo sapiens
gatcctggctatagatgat

SEQ ID NO: 1537 - DNA, 19 bp, Homo sapiens
atcctggctatagatgatg

SEQ ID NO: 1538 - DNA, 19 bp, Homo sapiens
tcctggctatagatgatgg

SEQ ID NO: 1539 - DNA, 19 bp, Homo sapiens
cctggctatagatgatggc

SEQ ID NO: 1540 - DNA, 19 bp, Homo sapiens
ctggctatagatgatggct

SEQ ID NO: 1541 - DNA, 19 bp, Homo sapiens
tggctatagatgatggctc

SEQ ID NO: 1542 - DNA, 19 bp, Homo sapiens
ggctatagatgatggctct

SEQ ID NO: 1543 - DNA, 19 bp, Homo sapiens
gctatagatgatggctctg

SEQ ID NO: 1544 - DNA, 19 bp, Homo sapiens
ctatagatgatggctctgg

SEQ ID NO: 1545 - DNA, 19 bp, Homo sapiens
tatagatgatggctctgga

SEQ ID NO: 1546 - DNA, 19 bp, Homo sapiens
atagatgatggctctggaa

SEQ ID NO: 1547 - DNA, 19 bp, Homo sapiens
tagatgatggctctggaaa

SEQ ID NO: 1548 - DNA, 19 bp, Homo sapiens
agatgatggctctggaaaa

SEQ ID NO: 1549 - DNA, 19 bp, Homo sapiens
gatgatggctctggaaaaa

SEQ ID NO: 1550 - DNA, 19 bp, Homo sapiens
atgatggctctggaaaaac

SEQ ID NO: 1551 - DNA, 19 bp, Homo sapiens
tgatggctctggaaaaaca

SEQ ID NO: 1552 - DNA, 19 bp, Homo sapiens
gatggctctggaaaaacag

SEQ ID NO: 1553 - DNA, 19 bp, Homo sapiens
atggctctggaaaaacagc

SEQ ID NO: 1554 - DNA, 19 bp, Homo sapiens
tggctctggaaaaacagct

SEQ ID NO: 1555 - DNA, 19 bp, Homo sapiens
ggctctggaaaaacagcta

SEQ ID NO: 1556 - DNA, 19 bp, Homo sapiens
gctctggaaaaacagctac

SEQ ID NO: 1557 - DNA, 19 bp, Homo sapiens
ctctggaaaaacagctaca

SEQ ID NO: 1558 - DNA, 19 bp, Homo sapiens
tctggaaaaacagctacag

SEQ ID NO: 1559 - DNA, 19 bp, Homo sapiens
ctggaaaaacagctacagg

SEQ ID NO: 1560 - DNA, 19 bp, Homo sapiens
tggaaaaacagctacagga

SEQ ID NO: 1561 - DNA, 19 bp, Homo sapiens
ggaaaaacagctacaggaa

SEQ ID NO: 1562 - DNA, 19 bp, Homo sapiens
gaaaaacagctacaggaac

SEQ ID NO: 1563 - DNA, 19 bp, Homo sapiens
aaaaacagctacaggaacc

SEQ ID NO: 1564 - DNA, 19 bp, Homo sapiens
aaaacagctacaggaacca

SEQ ID NO: 1565 - DNA, 19 bp, Homo sapiens
aaacagctacaggaaccat

SEQ ID NO: 1566 - DNA, 19 bp, Homo sapiens
aacagctacaggaaccata

SEQ ID NO: 1567 - DNA, 19 bp, Homo sapiens
acagctacaggaaccatat

SEQ ID NO: 1568 - DNA, 19 bp, Homo sapiens
cagctacaggaaccatatg

SEQ ID NO: 1569 - DNA, 19 bp, Homo sapiens
agctacaggaaccatatgt

SEQ ID NO: 1570 - DNA, 19 bp, Homo sapiens
gctacaggaaccatatgta

SEQ ID NO: 1571 - DNA, 19 bp, Homo sapiens
ctacaggaaccatatgtat

SEQ ID NO: 1572 - DNA, 19 bp, Homo sapiens
tacaggaaccatatgtatt

SEQ ID NO: 1573 - DNA, 19 bp, Homo sapiens
acaggaaccatatgtattg

SEQ ID NO: 1574 - DNA, 19 bp, Homo sapiens
caggaaccatatgtattga

SEQ ID NO: 1575 - DNA, 19 bp, Homo sapiens
aggaaccatatgtattgag

SEQ ID NO: 1576 - DNA, 19 bp, Homo sapiens
ggaaccatatgtattgagg

SEQ ID NO: 1577 - DNA, 19 bp, Homo sapiens
gaaccatatgtattgaggt

SEQ ID NO: 1578 - DNA, 19 bp, Homo sapiens
aaccatatgtattgaggtt

SEQ ID NO: 1579 - DNA, 19 bp, Homo sapiens
accatatgtattgaggttc

SEQ ID NO: 1580 - DNA, 19 bp, Homo sapiens
ccatatgtattgaggttcc

SEQ ID NO: 1581 - DNA, 19 bp, Homo sapiens
catatgtattgaggttcct

SEQ ID NO: 1582 - DNA, 19 bp, Homo sapiens
atatgtattgaggttcctg

SEQ ID NO: 1583 - DNA, 19 bp, Homo sapiens
tatgtattgaggttcctga

SEQ ID NO: 1584 - DNA, 19 bp, Homo sapiens
atgtattgaggttcctgat

SEQ ID NO: 1585 - DNA, 19 bp, Homo sapiens
tgtattgaggttcctgata

SEQ ID NO: 1586 - DNA, 19 bp, Homo sapiens
gtattgaggttcctgatat

SEQ ID NO: 1587 - DNA, 19 bp, Homo sapiens
tattgaggttcctgatatc

SEQ ID NO: 1588 - DNA, 19 bp, Homo sapiens
attgaggttcctgatatca

SEQ ID NO: 1589 - DNA, 19 bp, Homo sapiens
ttgaggttcctgatatcaa

SEQ ID NO: 1590 - DNA, 19 bp, Homo sapiens
tgaggttcctgatatcaat

SEQ ID NO: 1591 - DNA, 19 bp, Homo sapiens
gaggttcctgatatcaatg

SEQ ID NO: 1592 - DNA, 19 bp, Homo sapiens
aggttcctgatatcaatga

SEQ ID NO: 1593 - DNA, 19 bp, Homo sapiens
ggttcctgatatcaatgat

SEQ ID NO: 1594 - DNA, 19 bp, Homo sapiens
gttcctgatatcaatgatt

SEQ ID NO: 1595 - DNA, 19 bp, Homo sapiens
ttcctgatatcaatgatta

SEQ ID NO: 1596 - DNA, 19 bp, Homo sapiens
tcctgatatcaatgattat

SEQ ID NO: 1597 - DNA, 19 bp, Homo sapiens
cctgatatcaatgattatt

SEQ ID NO: 1598 - DNA, 19 bp, Homo sapiens
ctgatatcaatgattattg

SEQ ID NO: 1599 - DNA, 19 bp, Homo sapiens
tgatatcaatgattattgt

SEQ ID NO: 1600 - DNA, 19 bp, Homo sapiens
gatatcaatgattattgtc

SEQ ID NO: 1601 - DNA, 19 bp, Homo sapiens
atatcaatgattattgtcc

SEQ ID NO: 1602 - DNA, 19 bp, Homo sapiens
tatcaatgattattgtcca

SEQ ID NO: 1603 - DNA, 19 bp, Homo sapiens
atcaatgattattgtccaa

SEQ ID NO: 1604 - DNA, 19 bp, Homo sapiens
tcaatgattattgtccaaa

SEQ ID NO: 1605 - DNA, 19 bp, Homo sapiens
caatgattattgtccaaac

SEQ ID NO: 1606 - DNA, 19 bp, Homo sapiens
aatgattattgtccaaaca

SEQ ID NO: 1607 - DNA, 19 bp, Homo sapiens
atgattattgtccaaacat

SEQ ID NO: 1608 - DNA, 19 bp, Homo sapiens
tgattattgtccaaacatt

SEQ ID NO: 1609 - DNA, 19 bp, Homo sapiens
gattattgtccaaacattt

SEQ ID NO: 1610 - DNA, 19 bp, Homo sapiens
attattgtccaaacatttt

SEQ ID NO: 1611 - DNA, 19 bp, Homo sapiens
ttattgtccaaacattttt

SEQ ID NO: 1612 - DNA, 19 bp, Homo sapiens
tattgtccaaacatttttc

SEQ ID NO: 1613 - DNA, 19 bp, Homo sapiens
attgtccaaacatttttcc

SEQ ID NO: 1614 - DNA, 19 bp, Homo sapiens
ttgtccaaacatttttcct

SEQ ID NO: 1615 - DNA, 19 bp, Homo sapiens
tgtccaaacatttttcctg

SEQ ID NO: 1616 - DNA, 19 bp, Homo sapiens
gtccaaacatttttcctga

SEQ ID NO: 1617 - DNA, 19 bp, Homo sapiens
tccaaacatttttcctgaa

SEQ ID NO: 1618 - DNA, 19 bp, Homo sapiens
ccaaacatttttcctgaaa

SEQ ID NO: 1619 - DNA, 19 bp, Homo sapiens
caaacatttttcctgaaag

SEQ ID NO: 1620 - DNA, 19 bp, Homo sapiens
aaacatttttcctgaaaga

SEQ ID NO: 1621 - DNA, 19 bp, Homo sapiens
aacatttttcctgaaagaa

SEQ ID NO: 1622 - DNA, 19 bp, Homo sapiens
acatttttcctgaaagaag

SEQ ID NO: 1623 - DNA, 19 bp, Homo sapiens
catttttcctgaaagaaga

SEQ ID NO: 1624 - DNA, 19 bp, Homo sapiens
atttttcctgaaagaagaa

SEQ ID NO: 1625 - DNA, 19 bp, Homo sapiens
tttttcctgaaagaagaac

SEQ ID NO: 1626 - DNA, 19 bp, Homo sapiens
ttttcctgaaagaagaacc

SEQ ID NO: 1627 - DNA, 19 bp, Homo sapiens
tttcctgaaagaagaacca

SEQ ID NO: 1628 - DNA, 19 bp, Homo sapiens
ttcctgaaagaagaaccat

SEQ ID NO: 1629 - DNA, 19 bp, Homo sapiens
tcctgaaagaagaaccatc

SEQ ID NO: 1630 - DNA, 19 bp, Homo sapiens
cctgaaagaagaaccatct

SEQ ID NO: 1631 - DNA, 19 bp, Homo sapiens
ctgaaagaagaaccatctg

SEQ ID NO: 1632 - DNA, 19 bp, Homo sapiens
tgaaagaagaaccatctgc

SEQ ID NO: 1633 - DNA, 19 bp, Homo sapiens
gaaagaagaaccatctgca

SEQ ID NO: 1634 - DNA, 19 bp, Homo sapiens
aaagaagaaccatctgcat

SEQ ID NO: 1635 - DNA, 19 bp, Homo sapiens
aagaagaaccatctgcatt

SEQ ID NO: 1636 - DNA, 19 bp, Homo sapiens
agaagaaccatctgcattg

SEQ ID NO: 1637 - DNA, 19 bp, Homo sapiens
gaagaaccatctgcattga

SEQ ID NO: 1638 - DNA, 19 bp, Homo sapiens
aagaaccatctgcattgac

SEQ ID NO: 1639 - DNA, 19 bp, Homo sapiens
agaaccatctgcattgact

SEQ ID NO: 1640 - DNA, 19 bp, Homo sapiens
gaaccatctgcattgactc

SEQ ID NO: 1641 - DNA, 19 bp, Homo sapiens
aaccatctgcattgactct

SEQ ID NO: 1642 - DNA, 19 bp, Homo sapiens
accatctgcattgactctc

SEQ ID NO: 1643 - DNA, 19 bp, Homo sapiens
ccatctgcattgactctcc

SEQ ID NO: 1644 - DNA, 19 bp, Homo sapiens
catctgcattgactctcca

SEQ ID NO: 1645 - DNA, 19 bp, Homo sapiens
atctgcattgactctccat

SEQ ID NO: 1646 - DNA, 19 bp, Homo sapiens
tctgcattgactctccatc

SEQ ID NO: 1647 - DNA, 19 bp, Homo sapiens
ctgcattgactctccatca

SEQ ID NO: 1648 - DNA, 19 bp, Homo sapiens
tgcattgactctccatcag

SEQ ID NO: 1649 - DNA, 19 bp, Homo sapiens
gcattgactctccatcagt

SEQ ID NO: 1650 - DNA, 19 bp, Homo sapiens
cattgactctccatcagtc

SEQ ID NO: 1651 - DNA, 19 bp, Homo sapiens
attgactctccatcagtcc

SEQ ID NO: 1652 - DNA, 19 bp, Homo sapiens
ttgactctccatcagtcct

SEQ ID NO: 1653 - DNA, 19 bp, Homo sapiens
tgactctccatcagtcctt

SEQ ID NO: 1654 - DNA, 19 bp, Homo sapiens
gactctccatcagtcctta

SEQ ID NO: 1655 - DNA, 19 bp, Homo sapiens
actctccatcagtccttat

SEQ ID NO: 1656 - DNA, 19 bp, Homo sapiens
ctctccatcagtccttatc

SEQ ID NO: 1657 - DNA, 19 bp, Homo sapiens
tctccatcagtccttatct

SEQ ID NO: 1658 - DNA, 19 bp, Homo sapiens
ctccatcagtccttatctc

SEQ ID NO: 1659 - DNA, 19 bp, Homo sapiens
tccatcagtccttatctct

SEQ ID NO: 1660 - DNA, 19 bp, Homo sapiens
ccatcagtccttatctctg

SEQ ID NO: 1661 - DNA, 19 bp, Homo sapiens
catcagtccttatctctgt

SEQ ID NO: 1662 - DNA, 19 bp, Homo sapiens
atcagtccttatctctgtt

SEQ ID NO: 1663 - DNA, 19 bp, Homo sapiens
tcagtccttatctctgtta

SEQ ID NO: 1664 - DNA, 19 bp, Homo sapiens
cagtccttatctctgttaa

SEQ ID NO: 1665 - DNA, 19 bp, Homo sapiens
agtccttatctctgttaat

SEQ ID NO: 1666 - DNA, 19 bp, Homo sapiens
gtccttatctctgttaatg

SEQ ID NO: 1667 - DNA, 19 bp, Homo sapiens
tccttatctctgttaatga

SEQ ID NO: 1668 - DNA, 19 bp, Homo sapiens
ccttatctctgttaatgaa

SEQ ID NO: 1669 - DNA, 19 bp, Homo sapiens
cttatctctgttaatgaac

SEQ ID NO: 1670 - DNA, 19 bp, Homo sapiens
ttatctctgttaatgaaca

SEQ ID NO: 1671 - DNA, 19 bp, Homo sapiens
tatctctgttaatgaacat

SEQ ID NO: 1672 - DNA, 19 bp, Homo sapiens
atctctgttaatgaacatt

SEQ ID NO: 1673 - DNA, 19 bp, Homo sapiens
tctctgttaatgaacattc

SEQ ID NO: 1674 - DNA, 19 bp, Homo sapiens
ctctgttaatgaacattct

SEQ ID NO: 1675 - DNA, 19 bp, Homo sapiens
tctgttaatgaacattctt

SEQ ID NO: 1676 - DNA, 19 bp, Homo sapiens
ctgttaatgaacattctta

SEQ ID NO: 1677 - DNA, 19 bp, Homo sapiens
tgttaatgaacattcttat

SEQ ID NO: 1678 - DNA, 19 bp, Homo sapiens
gttaatgaacattcttatg

SEQ ID NO: 1679 - DNA, 19 bp, Homo sapiens
ttaatgaacattcttatgg

SEQ ID NO: 1680 - DNA, 19 bp, Homo sapiens
taatgaacattcttatggg

SEQ ID NO: 1681 - DNA, 19 bp, Homo sapiens
aatgaacattcttatgggt

SEQ ID NO: 1682 - DNA, 19 bp, Homo sapiens
atgaacattcttatgggtc

SEQ ID NO: 1683 - DNA, 19 bp, Homo sapiens
tgaacattcttatgggtct

SEQ ID NO: 1684 - DNA, 19 bp, Homo sapiens
gaacattcttatgggtctc

SEQ ID NO: 1685 - DNA, 19 bp, Homo sapiens
aacattcttatgggtctcc

SEQ ID NO: 1686 - DNA, 19 bp, Homo sapiens
acattcttatgggtctccg

SEQ ID NO: 1687 - DNA, 19 bp, Homo sapiens
cattcttatgggtctccgt

SEQ ID NO: 1688 - DNA, 19 bp, Homo sapiens
attcttatgggtctccgtt

SEQ ID NO: 1689 - DNA, 19 bp, Homo sapiens
ttcttatgggtctccgttt

SEQ ID NO: 1690 - DNA, 19 bp, Homo sapiens
tcttatgggtctccgttta

SEQ ID NO: 1691 - DNA, 19 bp, Homo sapiens
cttatgggtctccgtttac

SEQ ID NO: 1692 - DNA, 19 bp, Homo sapiens
ttatgggtctccgtttact

SEQ ID NO: 1693 - DNA, 19 bp, Homo sapiens
tatgggtctccgtttactt

SEQ ID NO: 1694 - DNA, 19 bp, Homo sapiens
atgggtctccgtttacttt

SEQ ID NO: 1695 - DNA, 19 bp, Homo sapiens
tgggtctccgtttactttc

SEQ ID NO: 1696 - DNA, 19 bp, Homo sapiens
gggtctccgtttactttct

SEQ ID NO: 1697 - DNA, 19 bp, Homo sapiens
ggtctccgtttactttctg

SEQ ID NO: 1698 - DNA, 19 bp, Homo sapiens
gtctccgtttactttctgt

SEQ ID NO: 1699 - DNA, 19 bp, Homo sapiens
tctccgtttactttctgtg

SEQ ID NO: 1700 - DNA, 19 bp, Homo sapiens
ctccgtttactttctgtgt

SEQ ID NO: 1701 - DNA, 19 bp, Homo sapiens
tccgtttactttctgtgtt

SEQ ID NO: 1702 - DNA, 19 bp, Homo sapiens
ccgtttactttctgtgttg

SEQ ID NO: 1703 - DNA, 19 bp, Homo sapiens
cgtttactttctgtgttgt

SEQ ID NO: 1704 - DNA, 19 bp, Homo sapiens
gtttactttctgtgttgtt

SEQ ID NO: 1705 - DNA, 19 bp, Homo sapiens
tttactttctgtgttgttg

SEQ ID NO: 1706 - DNA, 19 bp, Homo sapiens
ttactttctgtgttgttga

SEQ ID NO: 1707 - DNA, 19 bp, Homo sapiens
tactttctgtgttgttgat

SEQ ID NO: 1708 - DNA, 19 bp, Homo sapiens
actttctgtgttgttgatg

SEQ ID NO: 1709 - DNA, 19 bp, Homo sapiens
ctttctgtgttgttgatga

SEQ ID NO: 1710 - DNA, 19 bp, Homo sapiens
tttctgtgttgttgatgag

SEQ ID NO: 1711 - DNA, 19 bp, Homo sapiens
ttctgtgttgttgatgagc

SEQ ID NO: 1712 - DNA, 19 bp, Homo sapiens
tctgtgttgttgatgagcc

SEQ ID NO: 1713 - DNA, 19 bp, Homo sapiens
ctgtgttgttgatgagcca

SEQ ID NO: 1714 - DNA, 19 bp, Homo sapiens
tgtgttgttgatgagccac

SEQ ID NO: 1715 - DNA, 19 bp, Homo sapiens
gtgttgttgatgagccacc

SEQ ID NO: 1716 - DNA, 19 bp, Homo sapiens
tgttgttgatgagccacca

SEQ ID NO: 1717 - DNA, 19 bp, Homo sapiens
gttgttgatgagccaccag

SEQ ID NO: 1718 - DNA, 19 bp, Homo sapiens
ttgttgatgagccaccagg

SEQ ID NO: 1719 - DNA, 19 bp, Homo sapiens
tgttgatgagccaccagga

SEQ ID NO: 1720 - DNA, 19 bp, Homo sapiens
gttgatgagccaccaggaa

SEQ ID NO: 1721 - DNA, 19 bp, Homo sapiens
ttgatgagccaccaggaat

SEQ ID NO: 1722 - DNA, 19 bp, Homo sapiens
tgatgagccaccaggaata

SEQ ID NO: 1723 - DNA, 19 bp, Homo sapiens
gatgagccaccaggaatag

SEQ ID NO: 1724 - DNA, 19 bp, Homo sapiens
atgagccaccaggaatagc

SEQ ID NO: 1725 - DNA, 19 bp, Homo sapiens
tgagccaccaggaatagct

SEQ ID NO: 1726 - DNA, 19 bp, Homo sapiens
gagccaccaggaatagctg

SEQ ID NO: 1727 - DNA, 19 bp, Homo sapiens
agccaccaggaatagctga

SEQ ID NO: 1728 - DNA, 19 bp, Homo sapiens
gccaccaggaatagctgac

SEQ ID NO: 1729 - DNA, 19 bp, Homo sapiens
ccaccaggaatagctgaca

SEQ ID NO: 1730 - DNA, 19 bp, Homo sapiens
caccaggaatagctgacat

SEQ ID NO: 1731 - DNA, 19 bp, Homo sapiens
accaggaatagctgacatg

SEQ ID NO: 1732 - DNA, 19 bp, Homo sapiens
ccaggaatagctgacatgt

SEQ ID NO: 1733 - DNA, 19 bp, Homo sapiens
caggaatagctgacatgtg

SEQ ID NO: 1734 - DNA, 19 bp, Homo sapiens
aggaatagctgacatgtgg

SEQ ID NO: 1735 - DNA, 19 bp, Homo sapiens
ggaatagctgacatgtggg

SEQ ID NO: 1736 - DNA, 19 bp, Homo sapiens
gaatagctgacatgtggga

SEQ ID NO: 1737 - DNA, 19 bp, Homo sapiens
aatagctgacatgtgggat

SEQ ID NO: 1738 - DNA, 19 bp, Homo sapiens
atagctgacatgtgggatg

SEQ ID NO: 1739 - DNA, 19 bp, Homo sapiens
tagctgacatgtgggatgt

SEQ ID NO: 1740 - DNA, 19 bp, Homo sapiens
agctgacatgtgggatgtc

SEQ ID NO: 1741 - DNA, 19 bp, Homo sapiens
gctgacatgtgggatgtca

SEQ ID NO: 1742 - DNA, 19 bp, Homo sapiens
ctgacatgtgggatgtcag

SEQ ID NO: 1743 - DNA, 19 bp, Homo sapiens
tgacatgtgggatgtcaga

SEQ ID NO: 1744 - DNA, 19 bp, Homo sapiens
gacatgtgggatgtcagat

SEQ ID NO: 1745 - DNA, 19 bp, Homo sapiens
acatgtgggatgtcagatc

SEQ ID NO: 1746 - DNA, 19 bp, Homo sapiens
catgtgggatgtcagatca

SEQ ID NO: 1747 - DNA, 19 bp, Homo sapiens
atgtgggatgtcagatcaa

SEQ ID NO: 1748 - DNA, 19 bp, Homo sapiens
tgtgggatgtcagatcaac

SEQ ID NO: 1749 - DNA, 19 bp, Homo sapiens
gtgggatgtcagatcaaca

SEQ ID NO: 1750 - DNA, 19 bp, Homo sapiens
tgggatgtcagatcaacaa

SEQ ID NO: 1751 - DNA, 19 bp, Homo sapiens
gggatgtcagatcaacaaa

SEQ ID NO: 1752 - DNA, 19 bp, Homo sapiens
ggatgtcagatcaacaaat

SEQ ID NO: 1753 - DNA, 19 bp, Homo sapiens
gatgtcagatcaacaaatg

SEQ ID NO: 1754 - DNA, 19 bp, Homo sapiens
atgtcagatcaacaaatgc

SEQ ID NO: 1755 - DNA, 19 bp, Homo sapiens
tgtcagatcaacaaatgct

SEQ ID NO: 1756 - DNA, 19 bp, Homo sapiens
gtcagatcaacaaatgcta

SEQ ID NO: 1757 - DNA, 19 bp, Homo sapiens
tcagatcaacaaatgctac

SEQ ID NO: 1758 - DNA, 19 bp, Homo sapiens
cagatcaacaaatgctacc

SEQ ID NO: 1759 - DNA, 19 bp, Homo sapiens
agatcaacaaatgctacct

SEQ ID NO: 1760 - DNA, 19 bp, Homo sapiens
gatcaacaaatgctacctc

SEQ ID NO: 1761 - DNA, 19 bp, Homo sapiens
atcaacaaatgctacctcg

SEQ ID NO: 1762 - DNA, 19 bp, Homo sapiens
tcaacaaatgctacctcgg

SEQ ID NO: 1763 - DNA, 19 bp, Homo sapiens
caacaaatgctacctcggc

SEQ ID NO: 1764 - DNA, 19 bp, Homo sapiens
aacaaatgctacctcggca

SEQ ID NO: 1765 - DNA, 19 bp, Homo sapiens
acaaatgctacctcggcaa

SEQ ID NO: 1766 - DNA, 19 bp, Homo sapiens
caaatgctacctcggcaat

SEQ ID NO: 1767 - DNA, 19 bp, Homo sapiens
aaatgctacctcggcaatc

SEQ ID NO: 1768 - DNA, 19 bp, Homo sapiens
aatgctacctcggcaatcc

SEQ ID NO: 1769 - DNA, 19 bp, Homo sapiens
atgctacctcggcaatcct

SEQ ID NO: 1770 - DNA, 19 bp, Homo sapiens
tgctacctcggcaatcctt

SEQ ID NO: 1771 - DNA, 19 bp, Homo sapiens
gctacctcggcaatcctta

SEQ ID NO: 1772 - DNA, 19 bp, Homo sapiens
ctacctcggcaatccttac

SEQ ID NO: 1773 - DNA, 19 bp, Homo sapiens
tacctcggcaatccttacg

SEQ ID NO: 1774 - DNA, 19 bp, Homo sapiens
acctcggcaatccttacgg

SEQ ID NO: 1775 - DNA, 19 bp, Homo sapiens
cctcggcaatccttacggc

SEQ ID NO: 1776 - DNA, 19 bp, Homo sapiens
ctcggcaatccttacggct

SEQ ID NO: 1777 - DNA, 19 bp, Homo sapiens
tcggcaatccttacggcta

SEQ ID NO: 1778 - DNA, 19 bp, Homo sapiens
cggcaatccttacggctaa

SEQ ID NO: 1779 - DNA, 19 bp, Homo sapiens
ggcaatccttacggctaag

SEQ ID NO: 1780 - DNA, 19 bp, Homo sapiens
gcaatccttacggctaagc

SEQ ID NO: 1781 - DNA, 19 bp, Homo sapiens
caatccttacggctaagca

SEQ ID NO: 1782 - DNA, 19 bp, Homo sapiens
aatccttacggctaagcag

SEQ ID NO: 1783 - DNA, 19 bp, Homo sapiens
atccttacggctaagcagg

SEQ ID NO: 1784 - DNA, 19 bp, Homo sapiens
tccttacggctaagcaggt

SEQ ID NO: 1785 - DNA, 19 bp, Homo sapiens
ccttacggctaagcaggtt

SEQ ID NO: 1786 - DNA, 19 bp, Homo sapiens
cttacggctaagcaggttt

SEQ ID NO: 1787 - DNA, 19 bp, Homo sapiens
ttacggctaagcaggtttt

SEQ ID NO: 1788 - DNA, 19 bp, Homo sapiens
tacggctaagcaggtttta

SEQ ID NO: 1789 - DNA, 19 bp, Homo sapiens
acggctaagcaggttttat

SEQ ID NO: 1790 - DNA, 19 bp, Homo sapiens
cggctaagcaggttttatc

SEQ ID NO: 1791 - DNA, 19 bp, Homo sapiens
ggctaagcaggttttatct

SEQ ID NO: 1792 - DNA, 19 bp, Homo sapiens
gctaagcaggttttatctc

SEQ ID NO: 1793 - DNA, 19 bp, Homo sapiens
ctaagcaggttttatctcc

SEQ ID NO: 1794 - DNA, 19 bp, Homo sapiens
taagcaggttttatctcca

SEQ ID NO: 1795 - DNA, 19 bp, Homo sapiens
aagcaggttttatctccag

SEQ ID NO: 1796 - DNA, 19 bp, Homo sapiens
agcaggttttatctccagg

SEQ ID NO: 1797 - DNA, 19 bp, Homo sapiens
gcaggttttatctccagga

SEQ ID NO: 1798 - DNA, 19 bp, Homo sapiens
caggttttatctccaggat

SEQ ID NO: 1799 - DNA, 19 bp, Homo sapiens
aggttttatctccaggatt

SEQ ID NO: 1800 - DNA, 19 bp, Homo sapiens
ggttttatctccaggattt

SEQ ID NO: 1801 - DNA, 19 bp, Homo sapiens
gttttatctccaggatttt

SEQ ID NO: 1802 - DNA, 19 bp, Homo sapiens
ttttatctccaggatttta

SEQ ID NO: 1803 - DNA, 19 bp, Homo sapiens
tttatctccaggattttat

SEQ ID NO: 1804 - DNA, 19 bp, Homo sapiens
ttatctccaggattttatg

SEQ ID NO: 1805 - DNA, 19 bp, Homo sapiens
tatctccaggattttatga

SEQ ID NO: 1806 - DNA, 19 bp, Homo sapiens
atctccaggattttatgaa

SEQ ID NO: 1807 - DNA, 19 bp, Homo sapiens
tctccaggattttatgaaa

SEQ ID NO: 1808 - DNA, 19 bp, Homo sapiens
ctccaggattttatgaaat

SEQ ID NO: 1809 - DNA, 19 bp, Homo sapiens
tccaggattttatgaaatc

SEQ ID NO: 1810 - DNA, 19 bp, Homo sapiens
ccaggattttatgaaatcc

SEQ ID NO: 1811 - DNA, 19 bp, Homo sapiens
caggattttatgaaatccc

SEQ ID NO: 1812 - DNA, 19 bp, Homo sapiens
aggattttatgaaatccca

SEQ ID NO: 1813 - DNA, 19 bp, Homo sapiens
ggattttatgaaatcccaa

SEQ ID NO: 1814 - DNA, 19 bp, Homo sapiens
gattttatgaaatcccaat

SEQ ID NO: 1815 - DNA, 19 bp, Homo sapiens
attttatgaaatcccaatc

SEQ ID NO: 1816 - DNA, 19 bp, Homo sapiens
ttttatgaaatcccaatcc

SEQ ID NO: 1817 - DNA, 19 bp, Homo sapiens
tttatgaaatcccaatcct

SEQ ID NO: 1818 - DNA, 19 bp, Homo sapiens
ttatgaaatcccaatcctg

SEQ ID NO: 1819 - DNA, 19 bp, Homo sapiens
tatgaaatcccaatcctgg

SEQ ID NO: 1820 - DNA, 19 bp, Homo sapiens
atgaaatcccaatcctggt

SEQ ID NO: 1821 - DNA, 19 bp, Homo sapiens
tgaaatcccaatcctggtg

SEQ ID NO: 1822 - DNA, 19 bp, Homo sapiens
gaaatcccaatcctggtga

SEQ ID NO: 1823 - DNA, 19 bp, Homo sapiens
aaatcccaatcctggtgaa

SEQ ID NO: 1824 - DNA, 19 bp, Homo sapiens
aatcccaatcctggtgaag

SEQ ID NO: 1825 - DNA, 19 bp, Homo sapiens
atcccaatcctggtgaagg

SEQ ID NO: 1826 - DNA, 19 bp, Homo sapiens
tcccaatcctggtgaagga

SEQ ID NO: 1827 - DNA, 19 bp, Homo sapiens
cccaatcctggtgaaggac

SEQ ID NO: 1828 - DNA, 19 bp, Homo sapiens
ccaatcctggtgaaggaca

SEQ ID NO: 1829 - DNA, 19 bp, Homo sapiens
caatcctggtgaaggacag

SEQ ID NO: 1830 - DNA, 19 bp, Homo sapiens
aatcctggtgaaggacagc

SEQ ID NO: 1831 - DNA, 19 bp, Homo sapiens
atcctggtgaaggacagct

SEQ ID NO: 1832 - DNA, 19 bp, Homo sapiens
tcctggtgaaggacagcta

SEQ ID NO: 1833 - DNA, 19 bp, Homo sapiens
cctggtgaaggacagctat

SEQ ID NO: 1834 - DNA, 19 bp, Homo sapiens
ctggtgaaggacagctata

SEQ ID NO: 1835 - DNA, 19 bp, Homo sapiens
tggtgaaggacagctataa

SEQ ID NO: 1836 - DNA, 19 bp, Homo sapiens
ggtgaaggacagctataac

SEQ ID NO: 1837 - DNA, 19 bp, Homo sapiens
gtgaaggacagctataaca

SEQ ID NO: 1838 - DNA, 19 bp, Homo sapiens
tgaaggacagctataacag

SEQ ID NO: 1839 - DNA, 19 bp, Homo sapiens
gaaggacagctataacaga

SEQ ID NO: 1840 - DNA, 19 bp, Homo sapiens
aaggacagctataacagag

SEQ ID NO: 1841 - DNA, 19 bp, Homo sapiens
aggacagctataacagagc

SEQ ID NO: 1842 - DNA, 19 bp, Homo sapiens
ggacagctataacagagca

SEQ ID NO: 1843 - DNA, 19 bp, Homo sapiens
gacagctataacagagcat

SEQ ID NO: 1844 - DNA, 19 bp, Homo sapiens
acagctataacagagcatg

SEQ ID NO: 1845 - DNA, 19 bp, Homo sapiens
cagctataacagagcatgt

SEQ ID NO: 1846 - DNA, 19 bp, Homo sapiens
agctataacagagcatgtg

SEQ ID NO: 1847 - DNA, 19 bp, Homo sapiens
gctataacagagcatgtga

SEQ ID NO: 1848 - DNA, 19 bp, Homo sapiens
ctataacagagcatgtgaa

SEQ ID NO: 1849 - DNA, 19 bp, Homo sapiens
tataacagagcatgtgaat

SEQ ID NO: 1850 - DNA, 19 bp, Homo sapiens
ataacagagcatgtgaatt

SEQ ID NO: 1851 - DNA, 19 bp, Homo sapiens
taacagagcatgtgaattg

SEQ ID NO: 1852 - DNA, 19 bp, Homo sapiens
aacagagcatgtgaattgg

SEQ ID NO: 1853 - DNA, 19 bp, Homo sapiens
acagagcatgtgaattggc

SEQ ID NO: 1854 - DNA, 19 bp, Homo sapiens
cagagcatgtgaattggca

SEQ ID NO: 1855 - DNA, 19 bp, Homo sapiens
agagcatgtgaattggcac

SEQ ID NO: 1856 - DNA, 19 bp, Homo sapiens
gagcatgtgaattggcaca

SEQ ID NO: 1857 - DNA, 19 bp, Homo sapiens
agcatgtgaattggcacaa

SEQ ID NO: 1858 - DNA, 19 bp, Homo sapiens
gcatgtgaattggcacaaa

SEQ ID NO: 1859 - DNA, 19 bp, Homo sapiens
catgtgaattggcacaaat

SEQ ID NO: 1860 - DNA, 19 bp, Homo sapiens
atgtgaattggcacaaatg

SEQ ID NO: 1861 - DNA, 19 bp, Homo sapiens
tgtgaattggcacaaatgg

SEQ ID NO: 1862 - DNA, 19 bp, Homo sapiens
gtgaattggcacaaatggt

SEQ ID NO: 1863 - DNA, 19 bp, Homo sapiens
tgaattggcacaaatggtg

SEQ ID NO: 1864 - DNA, 19 bp, Homo sapiens
gaattggcacaaatggtgc

SEQ ID NO: 1865 - DNA, 19 bp, Homo sapiens
aattggcacaaatggtgca

SEQ ID NO: 1866 - DNA, 19 bp, Homo sapiens
attggcacaaatggtgcag

SEQ ID NO: 1867 - DNA, 19 bp, Homo sapiens
ttggcacaaatggtgcagt

SEQ ID NO: 1868 - DNA, 19 bp, Homo sapiens
tggcacaaatggtgcagtt

SEQ ID NO: 1869 - DNA, 19 bp, Homo sapiens
ggcacaaatggtgcagtta

SEQ ID NO: 1870 - DNA, 19 bp, Homo sapiens
gcacaaatggtgcagttat

SEQ ID NO: 1871 - DNA, 19 bp, Homo sapiens
cacaaatggtgcagttata

SEQ ID NO: 1872 - DNA, 19 bp, Homo sapiens
acaaatggtgcagttatat

SEQ ID NO: 1873 - DNA, 19 bp, Homo sapiens
caaatggtgcagttatatg

SEQ ID NO: 1874 - DNA, 19 bp, Homo sapiens
aaatggtgcagttatatgc

SEQ ID NO: 1875 - DNA, 19 bp, Homo sapiens
aatggtgcagttatatgcc

SEQ ID NO: 1876 - DNA, 19 bp, Homo sapiens
atggtgcagttatatgcct

SEQ ID NO: 1877 - DNA, 19 bp, Homo sapiens
tggtgcagttatatgcctg

SEQ ID NO: 1878 - DNA, 19 bp, Homo sapiens
ggtgcagttatatgcctgt

SEQ ID NO: 1879 - DNA, 19 bp, Homo sapiens
gtgcagttatatgcctgtg

SEQ ID NO: 1880 - DNA, 19 bp, Homo sapiens
tgcagttatatgcctgtga

SEQ ID NO: 1881 - DNA, 19 bp, Homo sapiens
gcagttatatgcctgtgat

SEQ ID NO: 1882 - DNA, 19 bp, Homo sapiens
cagttatatgcctgtgatt

SEQ ID NO: 1883 - DNA, 19 bp, Homo sapiens
agttatatgcctgtgattg

SEQ ID NO: 1884 - DNA, 19 bp, Homo sapiens
gttatatgcctgtgattgc

SEQ ID NO: 1885 - DNA, 19 bp, Homo sapiens
ttatatgcctgtgattgcg

SEQ ID NO: 1886 - DNA, 19 bp, Homo sapiens
tatatgcctgtgattgcga

SEQ ID NO: 1887 - DNA, 19 bp, Homo sapiens
atatgcctgtgattgcgat

SEQ ID NO: 1888 - DNA, 19 bp, Homo sapiens
tatgcctgtgattgcgatg

SEQ ID NO: 1889 - DNA, 19 bp, Homo sapiens
atgcctgtgattgcgatga

SEQ ID NO: 1890 - DNA, 19 bp, Homo sapiens
tgcctgtgattgcgatgac

SEQ ID NO: 1891 - DNA, 19 bp, Homo sapiens
gcctgtgattgcgatgaca

SEQ ID NO: 1892 - DNA, 19 bp, Homo sapiens
cctgtgattgcgatgacaa

SEQ ID NO: 1893 - DNA, 19 bp, Homo sapiens
ctgtgattgcgatgacaac

SEQ ID NO: 1894 - DNA, 19 bp, Homo sapiens
tgtgattgcgatgacaacc

SEQ ID NO: 1895 - DNA, 19 bp, Homo sapiens
gtgattgcgatgacaacca

SEQ ID NO: 1896 - DNA, 19 bp, Homo sapiens
tgattgcgatgacaaccac

SEQ ID NO: 1897 - DNA, 19 bp, Homo sapiens
gattgcgatgacaaccaca

SEQ ID NO: 1898 - DNA, 19 bp, Homo sapiens
attgcgatgacaaccacat

SEQ ID NO: 1899 - DNA, 19 bp, Homo sapiens
ttgcgatgacaaccacatg

SEQ ID NO: 1900 - DNA, 19 bp, Homo sapiens
tgcgatgacaaccacatgt

SEQ ID NO: 1901 - DNA, 19 bp, Homo sapiens
gcgatgacaaccacatgtg

SEQ ID NO: 1902 - DNA, 19 bp, Homo sapiens
cgatgacaaccacatgtgc

SEQ ID NO: 1903 - DNA, 19 bp, Homo sapiens
gatgacaaccacatgtgcc

SEQ ID NO: 1904 - DNA, 19 bp, Homo sapiens
atgacaaccacatgtgcct

SEQ ID NO: 1905 - DNA, 19 bp, Homo sapiens
tgacaaccacatgtgcctg

SEQ ID NO: 1906 - DNA, 19 bp, Homo sapiens
gacaaccacatgtgcctgg

SEQ ID NO: 1907 - DNA, 19 bp, Homo sapiens
acaaccacatgtgcctgga

SEQ ID NO: 1908 - DNA, 19 bp, Homo sapiens
caaccacatgtgcctggac

SEQ ID NO: 1909 - DNA, 19 bp, Homo sapiens
aaccacatgtgcctggact

SEQ ID NO: 1910 - DNA, 19 bp, Homo sapiens
accacatgtgcctggactc

SEQ ID NO: 1911 - DNA, 19 bp, Homo sapiens
ccacatgtgcctggactct

SEQ ID NO: 1912 - DNA, 19 bp, Homo sapiens
cacatgtgcctggactctg

SEQ ID NO: 1913 - DNA, 19 bp, Homo sapiens
acatgtgcctggactctgg

SEQ ID NO: 1914 - DNA, 19 bp, Homo sapiens
catgtgcctggactctggt

SEQ ID NO: 1915 - DNA, 19 bp, Homo sapiens
atgtgcctggactctggtg

SEQ ID NO: 1916 - DNA, 19 bp, Homo sapiens
tgtgcctggactctggtgc

SEQ ID NO: 1917 - DNA, 19 bp, Homo sapiens
gtgcctggactctggtgcc

SEQ ID NO: 1918 - DNA, 19 bp, Homo sapiens
tgcctggactctggtgccg

SEQ ID NO: 1919 - DNA, 19 bp, Homo sapiens
gcctggactctggtgccgc

SEQ ID NO: 1920 - DNA, 19 bp, Homo sapiens
cctggactctggtgccgcg

SEQ ID NO: 1921 - DNA, 19 bp, Homo sapiens
ctggactctggtgccgcgg

SEQ ID NO: 1922 - DNA, 19 bp, Homo sapiens
tggactctggtgccgcggg

SEQ ID NO: 1923 - DNA, 19 bp, Homo sapiens
ggactctggtgccgcgggc

SEQ ID NO: 1924 - DNA, 19 bp, Homo sapiens
gactctggtgccgcgggca

SEQ ID NO: 1925 - DNA, 19 bp, Homo sapiens
actctggtgccgcgggcat

SEQ ID NO: 1926 - DNA, 19 bp, Homo sapiens
ctctggtgccgcgggcatc

SEQ ID NO: 1927 - DNA, 19 bp, Homo sapiens
tctggtgccgcgggcatct

SEQ ID NO: 1928 - DNA, 19 bp, Homo sapiens
ctggtgccgcgggcatcta

SEQ ID NO: 1929 - DNA, 19 bp, Homo sapiens
tggtgccgcgggcatctac

SEQ ID NO: 1930 - DNA, 19 bp, Homo sapiens
ggtgccgcgggcatctaca

SEQ ID NO: 1931 - DNA, 19 bp, Homo sapiens
gtgccgcgggcatctacac

SEQ ID NO: 1932 - DNA, 19 bp, Homo sapiens
tgccgcgggcatctacaca

SEQ ID NO: 1933 - DNA, 19 bp, Homo sapiens
gccgcgggcatctacacag

SEQ ID NO: 1934 - DNA, 19 bp, Homo sapiens
ccgcgggcatctacacaga

SEQ ID NO: 1935 - DNA, 19 bp, Homo sapiens
cgcgggcatctacacagag

SEQ ID NO: 1936 - DNA, 19 bp, Homo sapiens
gcgggcatctacacagagg

SEQ ID NO: 1937 - DNA, 19 bp, Homo sapiens
cgggcatctacacagagga

SEQ ID NO: 1938 - DNA, 19 bp, Homo sapiens
gggcatctacacagaggac

SEQ ID NO: 1939 - DNA, 19 bp, Homo sapiens
ggcatctacacagaggaca

SEQ ID NO: 1940 - DNA, 19 bp, Homo sapiens
gcatctacacagaggacat

SEQ ID NO: 1941 - DNA, 19 bp, Homo sapiens
catctacacagaggacata

SEQ ID NO: 1942 - DNA, 19 bp, Homo sapiens
atctacacagaggacataa

SEQ ID NO: 1943 - DNA, 19 bp, Homo sapiens
tctacacagaggacataac

SEQ ID NO: 1944 - DNA, 19 bp, Homo sapiens
ctacacagaggacataact

SEQ ID NO: 1945 - DNA, 19 bp, Homo sapiens
tacacagaggacataactg

SEQ ID NO: 1946 - DNA, 19 bp, Homo sapiens
acacagaggacataactgg

SEQ ID NO: 1947 - DNA, 19 bp, Homo sapiens
cacagaggacataactggt

SEQ ID NO: 1948 - DNA, 19 bp, Homo sapiens
acagaggacataactggtg

SEQ ID NO: 1949 - DNA, 19 bp, Homo sapiens
cagaggacataactggtga

SEQ ID NO: 1950 - DNA, 19 bp, Homo sapiens
agaggacataactggtgac

SEQ ID NO: 1951 - DNA, 19 bp, Homo sapiens
gaggacataactggtgaca

SEQ ID NO: 1952 - DNA, 19 bp, Homo sapiens
aggacataactggtgacac

SEQ ID NO: 1953 - DNA, 19 bp, Homo sapiens
ggacataactggtgacacg

SEQ ID NO: 1954 - DNA, 19 bp, Homo sapiens
gacataactggtgacacgt

SEQ ID NO: 1955 - DNA, 19 bp, Homo sapiens
acataactggtgacacgta

SEQ ID NO: 1956 - DNA, 19 bp, Homo sapiens
cataactggtgacacgtat

SEQ ID NO: 1957 - DNA, 19 bp, Homo sapiens
ataactggtgacacgtatg

SEQ ID NO: 1958 - DNA, 19 bp, Homo sapiens
taactggtgacacgtatgg

SEQ ID NO: 1959 - DNA, 19 bp, Homo sapiens
aactggtgacacgtatggg

SEQ ID NO: 1960 - DNA, 19 bp, Homo sapiens
actggtgacacgtatgggc

SEQ ID NO: 1961 - DNA, 19 bp, Homo sapiens
ctggtgacacgtatgggcc

SEQ ID NO: 1962 - DNA, 19 bp, Homo sapiens
tggtgacacgtatgggcct

SEQ ID NO: 1963 - DNA, 19 bp, Homo sapiens
ggtgacacgtatgggcctg

SEQ ID NO: 1964 - DNA, 19 bp, Homo sapiens
gtgacacgtatgggcctgt

SEQ ID NO: 1965 - DNA, 19 bp, Homo sapiens
tgacacgtatgggcctgtc

SEQ ID NO: 1966 - DNA, 19 bp, Homo sapiens
gacacgtatgggcctgtca

SEQ ID NO: 1967 - DNA, 19 bp, Homo sapiens
acacgtatgggcctgtcac

SEQ ID NO: 1968 - DNA, 19 bp, Homo sapiens
cacgtatgggcctgtcact

SEQ ID NO: 1969 - DNA, 19 bp, Homo sapiens
acgtatgggcctgtcactg

SEQ ID NO: 1970 - DNA, 19 bp, Homo sapiens
cgtatgggcctgtcactga

SEQ ID NO: 1971 - DNA, 19 bp, Homo sapiens
gtatgggcctgtcactgaa

SEQ ID NO: 1972 - DNA, 19 bp, Homo sapiens
tatgggcctgtcactgaag

SEQ ID NO: 1973 - DNA, 19 bp, Homo sapiens
atgggcctgtcactgaaga

SEQ ID NO: 1974 - DNA, 19 bp, Homo sapiens
tgggcctgtcactgaagac

SEQ ID NO: 1975 - DNA, 19 bp, Homo sapiens
gggcctgtcactgaagacc

SEQ ID NO: 1976 - DNA, 19 bp, Homo sapiens
ggcctgtcactgaagacca

SEQ ID NO: 1977 - DNA, 19 bp, Homo sapiens
gcctgtcactgaagaccaa

SEQ ID NO: 1978 - DNA, 19 bp, Homo sapiens
cctgtcactgaagaccaag

SEQ ID NO: 1979 - DNA, 19 bp, Homo sapiens
ctgtcactgaagaccaagc

SEQ ID NO: 1980 - DNA, 19 bp, Homo sapiens
tgtcactgaagaccaagct

SEQ ID NO: 1981 - DNA, 19 bp, Homo sapiens
gtcactgaagaccaagctg

SEQ ID NO: 1982 - DNA, 19 bp, Homo sapiens
tcactgaagaccaagctgg

SEQ ID NO: 1983 - DNA, 19 bp, Homo sapiens
cactgaagaccaagctgga

SEQ ID NO: 1984 - DNA, 19 bp, Homo sapiens
actgaagaccaagctggag

SEQ ID NO: 1985 - DNA, 19 bp, Homo sapiens
ctgaagaccaagctggagt

SEQ ID NO: 1986 - DNA, 19 bp, Homo sapiens
tgaagaccaagctggagtt

SEQ ID NO: 1987 - DNA, 19 bp, Homo sapiens
gaagaccaagctggagttt

SEQ ID NO: 1988 - DNA, 19 bp, Homo sapiens
aagaccaagctggagtttc

SEQ ID NO: 1989 - DNA, 19 bp, Homo sapiens
agaccaagctggagtttca

SEQ ID NO: 1990 - DNA, 19 bp, Homo sapiens
gaccaagctggagtttcaa

SEQ ID NO: 1991 - DNA, 19 bp, Homo sapiens
accaagctggagtttcaaa

SEQ ID NO: 1992 - DNA, 19 bp, Homo sapiens
ccaagctggagtttcaaat

SEQ ID NO: 1993 - DNA, 19 bp, Homo sapiens
caagctggagtttcaaatg

SEQ ID NO: 1994 - DNA, 19 bp, Homo sapiens
aagctggagtttcaaatgt

SEQ ID NO: 1995 - DNA, 19 bp, Homo sapiens
agctggagtttcaaatgtt

SEQ ID NO: 1996 - DNA, 19 bp, Homo sapiens
gctggagtttcaaatgttg

SEQ ID NO: 1997 - DNA, 19 bp, Homo sapiens
ctggagtttcaaatgttgg

SEQ ID NO: 1998 - DNA, 19 bp, Homo sapiens
tggagtttcaaatgttggt

SEQ ID NO: 1999 - DNA, 19 bp, Homo sapiens
ggagtttcaaatgttggtc

SEQ ID NO: 2000 - DNA, 19 bp, Homo sapiens
gagtttcaaatgttggtct

SEQ ID NO: 2001 - DNA, 19 bp, Homo sapiens
agtttcaaatgttggtctt

SEQ ID NO: 2002 - DNA, 19 bp, Homo sapiens
gtttcaaatgttggtcttg

SEQ ID NO: 2003 - DNA, 19 bp, Homo sapiens
tttcaaatgttggtcttgg

SEQ ID NO: 2004 - DNA, 19 bp, Homo sapiens
ttcaaatgttggtcttgga

SEQ ID NO: 2005 - DNA, 19 bp, Homo sapiens
tcaaatgttggtcttggac

SEQ ID NO: 2006 - DNA, 19 bp, Homo sapiens
caaatgttggtcttggacc

SEQ ID NO: 2007 - DNA, 19 bp, Homo sapiens
aaatgttggtcttggacca

SEQ ID NO: 2008 - DNA, 19 bp, Homo sapiens
aatgttggtcttggaccag

SEQ ID NO: 2009 - DNA, 19 bp, Homo sapiens
atgttggtcttggaccagc

SEQ ID NO: 2010 - DNA, 19 bp, Homo sapiens
tgttggtcttggaccagca

SEQ ID NO: 2011 - DNA, 19 bp, Homo sapiens
gttggtcttggaccagcag

SEQ ID NO: 2012 - DNA, 19 bp, Homo sapiens
ttggtcttggaccagcagg

SEQ ID NO: 2013 - DNA, 19 bp, Homo sapiens
tggtcttggaccagcaggg

SEQ ID NO: 2014 - DNA, 19 bp, Homo sapiens
ggtcttggaccagcaggga

SEQ ID NO: 2015 - DNA, 19 bp, Homo sapiens
gtcttggaccagcagggat

SEQ ID NO: 2016 - DNA, 19 bp, Homo sapiens
tcttggaccagcagggatt

SEQ ID NO: 2017 - DNA, 19 bp, Homo sapiens
cttggaccagcagggattg

SEQ ID NO: 2018 - DNA, 19 bp, Homo sapiens
ttggaccagcagggattgg

SEQ ID NO: 2019 - DNA, 19 bp, Homo sapiens
tggaccagcagggattggc

SEQ ID NO: 2020 - DNA, 19 bp, Homo sapiens
ggaccagcagggattggca

SEQ ID NO: 2021 - DNA, 19 bp, Homo sapiens
gaccagcagggattggcat

SEQ ID NO: 2022 - DNA, 19 bp, Homo sapiens
accagcagggattggcatg

SEQ ID NO: 2023 - DNA, 19 bp, Homo sapiens
ccagcagggattggcatga

SEQ ID NO: 2024 - DNA, 19 bp, Homo sapiens
cagcagggattggcatgat

SEQ ID NO: 2025 - DNA, 19 bp, Homo sapiens
agcagggattggcatgatg

SEQ ID NO: 2026 - DNA, 19 bp, Homo sapiens
gcagggattggcatgatgg

SEQ ID NO: 2027 - DNA, 19 bp, Homo sapiens
cagggattggcatgatggt

SEQ ID NO: 2028 - DNA, 19 bp, Homo sapiens
agggattggcatgatggtt

SEQ ID NO: 2029 - DNA, 19 bp, Homo sapiens
gggattggcatgatggttc

SEQ ID NO: 2030 - DNA, 19 bp, Homo sapiens
ggattggcatgatggttct

SEQ ID NO: 2031 - DNA, 19 bp, Homo sapiens
gattggcatgatggttctg

SEQ ID NO: 2032 - DNA, 19 bp, Homo sapiens
attggcatgatggttctgg

SEQ ID NO: 2033 - DNA, 19 bp, Homo sapiens
ttggcatgatggttctggg

SEQ ID NO: 2034 - DNA, 19 bp, Homo sapiens
tggcatgatggttctgggc

SEQ ID NO: 2035 - DNA, 19 bp, Homo sapiens
ggcatgatggttctgggca

SEQ ID NO: 2036 - DNA, 19 bp, Homo sapiens
gcatgatggttctgggcat

SEQ ID NO: 2037 - DNA, 19 bp, Homo sapiens
catgatggttctgggcatc

SEQ ID NO: 2038 - DNA, 19 bp, Homo sapiens
atgatggttctgggcatcc

SEQ ID NO: 2039 - DNA, 19 bp, Homo sapiens
tgatggttctgggcatcct

SEQ ID NO: 2040 - DNA, 19 bp, Homo sapiens
gatggttctgggcatcctg

SEQ ID NO: 2041 - DNA, 19 bp, Homo sapiens
atggttctgggcatcctgc

SEQ ID NO: 2042 - DNA, 19 bp, Homo sapiens
tggttctgggcatcctgct

SEQ ID NO: 2043 - DNA, 19 bp, Homo sapiens
ggttctgggcatcctgcta

SEQ ID NO: 2044 - DNA, 19 bp, Homo sapiens
gttctgggcatcctgctac

SEQ ID NO: 2045 - DNA, 19 bp, Homo sapiens
ttctgggcatcctgctact

SEQ ID NO: 2046 - DNA, 19 bp, Homo sapiens
tctgggcatcctgctactg

SEQ ID NO: 2047 - DNA, 19 bp, Homo sapiens
ctgggcatcctgctactga

SEQ ID NO: 2048 - DNA, 19 bp, Homo sapiens
tgggcatcctgctactgat

SEQ ID NO: 2049 - DNA, 19 bp, Homo sapiens
gggcatcctgctactgatt

SEQ ID NO: 2050 - DNA, 19 bp, Homo sapiens
ggcatcctgctactgattt

SEQ ID NO: 2051 - DNA, 19 bp, Homo sapiens
gcatcctgctactgatttt

SEQ ID NO: 2052 - DNA, 19 bp, Homo sapiens
catcctgctactgattttg

SEQ ID NO: 2053 - DNA, 19 bp, Homo sapiens
atcctgctactgattttgg

SEQ ID NO: 2054 - DNA, 19 bp, Homo sapiens
tcctgctactgattttggc

SEQ ID NO: 2055 - DNA, 19 bp, Homo sapiens
cctgctactgattttggct

SEQ ID NO: 2056 - DNA, 19 bp, Homo sapiens
ctgctactgattttggctc

SEQ ID NO: 2057 - DNA, 19 bp, Homo sapiens
tgctactgattttggctcc

SEQ ID NO: 2058 - DNA, 19 bp, Homo sapiens
gctactgattttggctcca

SEQ ID NO: 2059 - DNA, 19 bp, Homo sapiens
ctactgattttggctccac

SEQ ID NO: 2060 - DNA, 19 bp, Homo sapiens
tactgattttggctccact

SEQ ID NO: 2061 - DNA, 19 bp, Homo sapiens
actgattttggctccactc

SEQ ID NO: 2062 - DNA, 19 bp, Homo sapiens
ctgattttggctccactct

SEQ ID NO: 2063 - DNA, 19 bp, Homo sapiens
tgattttggctccactctt

SEQ ID NO: 2064 - DNA, 19 bp, Homo sapiens
gattttggctccactcttg

SEQ ID NO: 2065 - DNA, 19 bp, Homo sapiens
attttggctccactcttgc

SEQ ID NO: 2066 - DNA, 19 bp, Homo sapiens
ttttggctccactcttgct

SEQ ID NO: 2067 - DNA, 19 bp, Homo sapiens
tttggctccactcttgctg

SEQ ID NO: 2068 - DNA, 19 bp, Homo sapiens
ttggctccactcttgctgc

SEQ ID NO: 2069 - DNA, 19 bp, Homo sapiens
tggctccactcttgctgct

SEQ ID NO: 2070 - DNA, 19 bp, Homo sapiens
ggctccactcttgctgctc

SEQ ID NO: 2071 - DNA, 19 bp, Homo sapiens
gctccactcttgctgctcc

SEQ ID NO: 2072 - DNA, 19 bp, Homo sapiens
ctccactcttgctgctcct

SEQ ID NO: 2073 - DNA, 19 bp, Homo sapiens
tccactcttgctgctcctg

SEQ ID NO: 2074 - DNA, 19 bp, Homo sapiens
ccactcttgctgctcctgt

SEQ ID NO: 2075 - DNA, 19 bp, Homo sapiens
cactcttgctgctcctgtg

SEQ ID NO: 2076 - DNA, 19 bp, Homo sapiens
actcttgctgctcctgtgt

SEQ ID NO: 2077 - DNA, 19 bp, Homo sapiens
ctcttgctgctcctgtgtt

SEQ ID NO: 2078 - DNA, 19 bp, Homo sapiens
tcttgctgctcctgtgttg

SEQ ID NO: 2079 - DNA, 19 bp, Homo sapiens
cttgctgctcctgtgttgc

SEQ ID NO: 2080 - DNA, 19 bp, Homo sapiens
ttgctgctcctgtgttgct

SEQ ID NO: 2081 - DNA, 19 bp, Homo sapiens
tgctgctcctgtgttgctg

SEQ ID NO: 2082 - DNA, 19 bp, Homo sapiens
gctgctcctgtgttgctgc

SEQ ID NO: 2083 - DNA, 19 bp, Homo sapiens
ctgctcctgtgttgctgca

SEQ ID NO: 2084 - DNA, 19 bp, Homo sapiens
tgctcctgtgttgctgcaa

SEQ ID NO: 2085 - DNA, 19 bp, Homo sapiens
gctcctgtgttgctgcaaa

SEQ ID NO: 2086 - DNA, 19 bp, Homo sapiens
ctcctgtgttgctgcaaac

SEQ ID NO: 2087 - DNA, 19 bp, Homo sapiens
tcctgtgttgctgcaaaca

SEQ ID NO: 2088 - DNA, 19 bp, Homo sapiens
cctgtgttgctgcaaacag

SEQ ID NO: 2089 - DNA, 19 bp, Homo sapiens
ctgtgttgctgcaaacaga

SEQ ID NO: 2090 - DNA, 19 bp, Homo sapiens
tgtgttgctgcaaacagag

SEQ ID NO: 2091 - DNA, 19 bp, Homo sapiens
gtgttgctgcaaacagaga

SEQ ID NO: 2092 - DNA, 19 bp, Homo sapiens
tgttgctgcaaacagagac

SEQ ID NO: 2093 - DNA, 19 bp, Homo sapiens
gttgctgcaaacagagaca

SEQ ID NO: 2094 - DNA, 19 bp, Homo sapiens
ttgctgcaaacagagacag

SEQ ID NO: 2095 - DNA, 19 bp, Homo sapiens
tgctgcaaacagagacagc

SEQ ID NO: 2096 - DNA, 19 bp, Homo sapiens
gctgcaaacagagacagcc

SEQ ID NO: 2097 - DNA, 19 bp, Homo sapiens
ctgcaaacagagacagcca

SEQ ID NO: 2098 - DNA, 19 bp, Homo sapiens
tgcaaacagagacagccag

SEQ ID NO: 2099 - DNA, 19 bp, Homo sapiens
gcaaacagagacagccaga

SEQ ID NO: 2100 - DNA, 19 bp, Homo sapiens
caaacagagacagccagaa

SEQ ID NO: 2101 - DNA, 19 bp, Homo sapiens
aaacagagacagccagaag

SEQ ID NO: 2102 - DNA, 19 bp, Homo sapiens
aacagagacagccagaagg

SEQ ID NO: 2103 - DNA, 19 bp, Homo sapiens
acagagacagccagaaggc

SEQ ID NO: 2104 - DNA, 19 bp, Homo sapiens
cagagacagccagaaggcc

SEQ ID NO: 2105 - DNA, 19 bp, Homo sapiens
agagacagccagaaggcct

SEQ ID NO: 2106 - DNA, 19 bp, Homo sapiens
gagacagccagaaggcctg

SEQ ID NO: 2107 - DNA, 19 bp, Homo sapiens
agacagccagaaggcctgg

SEQ ID NO: 2108 - DNA, 19 bp, Homo sapiens
gacagccagaaggcctggg

SEQ ID NO: 2109 - DNA, 19 bp, Homo sapiens
acagccagaaggcctggga

SEQ ID NO: 2110 - DNA, 19 bp, Homo sapiens
cagccagaaggcctgggaa

SEQ ID NO: 2111 - DNA, 19 bp, Homo sapiens
agccagaaggcctgggaac

SEQ ID NO: 2112 - DNA, 19 bp, Homo sapiens
gccagaaggcctgggaaca

SEQ ID NO: 2113 - DNA, 19 bp, Homo sapiens
ccagaaggcctgggaacaa

SEQ ID NO: 2114 - DNA, 19 bp, Homo sapiens
cagaaggcctgggaacaag

SEQ ID NO: 2115 - DNA, 19 bp, Homo sapiens
agaaggcctgggaacaaga

SEQ ID NO: 2116 - DNA, 19 bp, Homo sapiens
gaaggcctgggaacaagat

SEQ ID NO: 2117 - DNA, 19 bp, Homo sapiens
aaggcctgggaacaagatt

SEQ ID NO: 2118 - DNA, 19 bp, Homo sapiens
aggcctgggaacaagattt

SEQ ID NO: 2119 - DNA, 19 bp, Homo sapiens
ggcctgggaacaagatttg

SEQ ID NO: 2120 - DNA, 19 bp, Homo sapiens
gcctgggaacaagatttgc

SEQ ID NO: 2121 - DNA, 19 bp, Homo sapiens
cctgggaacaagatttgct

SEQ ID NO: 2122 - DNA, 19 bp, Homo sapiens
ctgggaacaagatttgctc

SEQ ID NO: 2123 - DNA, 19 bp, Homo sapiens
tgggaacaagatttgctcc

SEQ ID NO: 2124 - DNA, 19 bp, Homo sapiens
gggaacaagatttgctcct

SEQ ID NO: 2125 - DNA, 19 bp, Homo sapiens
ggaacaagatttgctcctg

SEQ ID NO: 2126 - DNA, 19 bp, Homo sapiens
gaacaagatttgctcctgt

SEQ ID NO: 2127 - DNA, 19 bp, Homo sapiens
aacaagatttgctcctgtg

SEQ ID NO: 2128 - DNA, 19 bp, Homo sapiens
acaagatttgctcctgtgc

SEQ ID NO: 2129 - DNA, 19 bp, Homo sapiens
caagatttgctcctgtgcc

SEQ ID NO: 2130 - DNA, 19 bp, Homo sapiens
aagatttgctcctgtgcct

SEQ ID NO: 2131 - DNA, 19 bp, Homo sapiens
agatttgctcctgtgcctg

SEQ ID NO: 2132 - DNA, 19 bp, Homo sapiens
gatttgctcctgtgcctga

SEQ ID NO: 2133 - DNA, 19 bp, Homo sapiens
atttgctcctgtgcctgag

SEQ ID NO: 2134 - DNA, 19 bp, Homo sapiens
tttgctcctgtgcctgagg

SEQ ID NO: 2135 - DNA, 19 bp, Homo sapiens
ttgctcctgtgcctgaggg

SEQ ID NO: 2136 - DNA, 19 bp, Homo sapiens
tgctcctgtgcctgagggc

SEQ ID NO: 2137 - DNA, 19 bp, Homo sapiens
gctcctgtgcctgagggcg

SEQ ID NO: 2138 - DNA, 19 bp, Homo sapiens
ctcctgtgcctgagggcgg

SEQ ID NO: 2139 - DNA, 19 bp, Homo sapiens
tcctgtgcctgagggcgga

SEQ ID NO: 2140 - DNA, 19 bp, Homo sapiens
cctgtgcctgagggcggag

SEQ ID NO: 2141 - DNA, 19 bp, Homo sapiens
ctgtgcctgagggcggaga

SEQ ID NO: 2142 - DNA, 19 bp, Homo sapiens
tgtgcctgagggcggagaa

SEQ ID NO: 2143 - DNA, 19 bp, Homo sapiens
gtgcctgagggcggagaag

SEQ ID NO: 2144 - DNA, 19 bp, Homo sapiens
tgcctgagggcggagaagg

SEQ ID NO: 2145 - DNA, 19 bp, Homo sapiens
gcctgagggcggagaagga

SEQ ID NO: 2146 - DNA, 19 bp, Homo sapiens
cctgagggcggagaaggag

SEQ ID NO: 2147 - DNA, 19 bp, Homo sapiens
ctgagggcggagaaggagt

SEQ ID NO: 2148 - DNA, 19 bp, Homo sapiens
tgagggcggagaaggagtg

SEQ ID NO: 2149 - DNA, 19 bp, Homo sapiens
gagggcggagaaggagtga

SEQ ID NO: 2150 - DNA, 19 bp, Homo sapiens
agggcggagaaggagtgat

SEQ ID NO: 2151 - DNA, 19 bp, Homo sapiens
gggcggagaaggagtgatg

SEQ ID NO: 2152 - DNA, 19 bp, Homo sapiens
ggcggagaaggagtgatgc

SEQ ID NO: 2153 - DNA, 19 bp, Homo sapiens
gcggagaaggagtgatgca

SEQ ID NO: 2154 - DNA, 19 bp, Homo sapiens
cggagaaggagtgatgcag

SEQ ID NO: 2155 - DNA, 19 bp, Homo sapiens
ggagaaggagtgatgcagt

SEQ ID NO: 2156 - DNA, 19 bp, Homo sapiens
gagaaggagtgatgcagtc

SEQ ID NO: 2157 - DNA, 19 bp, Homo sapiens
agaaggagtgatgcagtct

SEQ ID NO: 2158 - DNA, 19 bp, Homo sapiens
gaaggagtgatgcagtctt

SEQ ID NO: 2159 - DNA, 19 bp, Homo sapiens
aaggagtgatgcagtcttg

SEQ ID NO: 2160 - DNA, 19 bp, Homo sapiens
aggagtgatgcagtcttgg

SEQ ID NO: 2161 - DNA, 19 bp, Homo sapiens
ggagtgatgcagtcttgga

SEQ ID NO: 2162 - DNA, 19 bp, Homo sapiens
gagtgatgcagtcttggag

SEQ ID NO: 2163 - DNA, 19 bp, Homo sapiens
agtgatgcagtcttggaga

SEQ ID NO: 2164 - DNA, 19 bp, Homo sapiens
gtgatgcagtcttggagaa

SEQ ID NO: 2165 - DNA, 19 bp, Homo sapiens
tgatgcagtcttggagaat

SEQ ID NO: 2166 - DNA, 19 bp, Homo sapiens
gatgcagtcttggagaatt

SEQ ID NO: 2167 - DNA, 19 bp, Homo sapiens
atgcagtcttggagaattg

SEQ ID NO: 2168 - DNA, 19 bp, Homo sapiens
tgcagtcttggagaattga

SEQ ID NO: 2169 - DNA, 19 bp, Homo sapiens
gcagtcttggagaattgaa

SEQ ID NO: 2170 - DNA, 19 bp, Homo sapiens
cagtcttggagaattgaag

SEQ ID NO: 2171 - DNA, 19 bp, Homo sapiens
agtcttggagaattgaagg

SEQ ID NO: 2172 - DNA, 19 bp, Homo sapiens
gtcttggagaattgaaggg

SEQ ID NO: 2173 - DNA, 19 bp, Homo sapiens
tcttggagaattgaagggg

SEQ ID NO: 2174 - DNA, 19 bp, Homo sapiens
cttggagaattgaaggggc

SEQ ID NO: 2175 - DNA, 19 bp, Homo sapiens
ttggagaattgaaggggcc

SEQ ID NO: 2176 - DNA, 19 bp, Homo sapiens
tggagaattgaaggggccc

SEQ ID NO: 2177 - DNA, 19 bp, Homo sapiens
ggagaattgaaggggccca

SEQ ID NO: 2178 - DNA, 19 bp, Homo sapiens
gagaattgaaggggcccat

SEQ ID NO: 2179 - DNA, 19 bp, Homo sapiens
agaattgaaggggcccatc

SEQ ID NO: 2180 - DNA, 19 bp, Homo sapiens
gaattgaaggggcccatcc

SEQ ID NO: 2181 - DNA, 19 bp, Homo sapiens
aattgaaggggcccatccc

SEQ ID NO: 2182 - DNA, 19 bp, Homo sapiens
attgaaggggcccatcccg

SEQ ID NO: 2183 - DNA, 19 bp, Homo sapiens
ttgaaggggcccatcccga

SEQ ID NO: 2184 - DNA, 19 bp, Homo sapiens
tgaaggggcccatcccgag

SEQ ID NO: 2185 - DNA, 19 bp, Homo sapiens
gaaggggcccatcccgagg

SEQ ID NO: 2186 - DNA, 19 bp, Homo sapiens
aaggggcccatcccgagga

SEQ ID NO: 2187 - DNA, 19 bp, Homo sapiens
aggggcccatcccgaggac

SEQ ID NO: 2188 - DNA, 19 bp, Homo sapiens
ggggcccatcccgaggaca

SEQ ID NO: 2189 - DNA, 19 bp, Homo sapiens
gggcccatcccgaggacag

SEQ ID NO: 2190 - DNA, 19 bp, Homo sapiens
ggcccatcccgaggacagg

SEQ ID NO: 2191 - DNA, 19 bp, Homo sapiens
gcccatcccgaggacaggg

SEQ ID NO: 2192 - DNA, 19 bp, Homo sapiens
cccatcccgaggacaggga

SEQ ID NO: 2193 - DNA, 19 bp, Homo sapiens
ccatcccgaggacagggat

SEQ ID NO: 2194 - DNA, 19 bp, Homo sapiens
catcccgaggacagggatg

SEQ ID NO: 2195 - DNA, 19 bp, Homo sapiens
atcccgaggacagggatgt

SEQ ID NO: 2196 - DNA, 19 bp, Homo sapiens
tcccgaggacagggatgtg

SEQ ID NO: 2197 - DNA, 19 bp, Homo sapiens
cccgaggacagggatgtgt

SEQ ID NO: 2198 - DNA, 19 bp, Homo sapiens
ccgaggacagggatgtgtc

SEQ ID NO: 2199 - DNA, 19 bp, Homo sapiens
cgaggacagggatgtgtca

SEQ ID NO: 2200 - DNA, 19 bp, Homo sapiens
gaggacagggatgtgtcaa

SEQ ID NO: 2201 - DNA, 19 bp, Homo sapiens
aggacagggatgtgtcaaa

SEQ ID NO: 2202 - DNA, 19 bp, Homo sapiens
ggacagggatgtgtcaaat

SEQ ID NO: 2203 - DNA, 19 bp, Homo sapiens
gacagggatgtgtcaaata

SEQ ID NO: 2204 - DNA, 19 bp, Homo sapiens
acagggatgtgtcaaatat

SEQ ID NO: 2205 - DNA, 19 bp, Homo sapiens
cagggatgtgtcaaatata

SEQ ID NO: 2206 - DNA, 19 bp, Homo sapiens
agggatgtgtcaaatatat

SEQ ID NO: 2207 - DNA, 19 bp, Homo sapiens
gggatgtgtcaaatatatg

SEQ ID NO: 2208 - DNA, 19 bp, Homo sapiens
ggatgtgtcaaatatatgt

SEQ ID NO: 2209 - DNA, 19 bp, Homo sapiens
gatgtgtcaaatatatgtg

SEQ ID NO: 2210 - DNA, 19 bp, Homo sapiens
atgtgtcaaatatatgtgc

SEQ ID NO: 2211 - DNA, 19 bp, Homo sapiens
tgtgtcaaatatatgtgca

SEQ ID NO: 2212 - DNA, 19 bp, Homo sapiens
gtgtcaaatatatgtgcac

SEQ ID NO: 2213 - DNA, 19 bp, Homo sapiens
tgtcaaatatatgtgcacc

SEQ ID NO: 2214 - DNA, 19 bp, Homo sapiens
gtcaaatatatgtgcaccc

SEQ ID NO: 2215 - DNA, 19 bp, Homo sapiens
tcaaatatatgtgcaccca

SEQ ID NO: 2216 - DNA, 19 bp, Homo sapiens
caaatatatgtgcacccat

SEQ ID NO: 2217 - DNA, 19 bp, Homo sapiens
aaatatatgtgcacccatg

SEQ ID NO: 2218 - DNA, 19 bp, Homo sapiens
aatatatgtgcacccatga

SEQ ID NO: 2219 - DNA, 19 bp, Homo sapiens
atatatgtgcacccatgac

SEQ ID NO: 2220 - DNA, 19 bp, Homo sapiens
tatatgtgcacccatgaca

SEQ ID NO: 2221 - DNA, 19 bp, Homo sapiens
atatgtgcacccatgacag

SEQ ID NO: 2222 - DNA, 19 bp, Homo sapiens
tatgtgcacccatgacagc

SEQ ID NO: 2223 - DNA, 19 bp, Homo sapiens
atgtgcacccatgacagcc

SEQ ID NO: 2224 - DNA, 19 bp, Homo sapiens
tgtgcacccatgacagcct

SEQ ID NO: 2225 - DNA, 19 bp, Homo sapiens
gtgcacccatgacagcctc

SEQ ID NO: 2226 - DNA, 19 bp, Homo sapiens
tgcacccatgacagcctca

SEQ ID NO: 2227 - DNA, 19 bp, Homo sapiens
gcacccatgacagcctcaa

SEQ ID NO: 2228 - DNA, 19 bp, Homo sapiens
cacccatgacagcctcaaa

SEQ ID NO: 2229 - DNA, 19 bp, Homo sapiens
acccatgacagcctcaaat

SEQ ID NO: 2230 - DNA, 19 bp, Homo sapiens
cccatgacagcctcaaata

SEQ ID NO: 2231 - DNA, 19 bp, Homo sapiens
ccatgacagcctcaaatac

SEQ ID NO: 2232 - DNA, 19 bp, Homo sapiens
catgacagcctcaaatacc

SEQ ID NO: 2233 - DNA, 19 bp, Homo sapiens
atgacagcctcaaataccc

SEQ ID NO: 2234 - DNA, 19 bp, Homo sapiens
tgacagcctcaaataccca

SEQ ID NO: 2235 - DNA, 19 bp, Homo sapiens
gacagcctcaaatacccag

SEQ ID NO: 2236 - DNA, 19 bp, Homo sapiens
acagcctcaaatacccagg

SEQ ID NO: 2237 - DNA, 19 bp, Homo sapiens
cagcctcaaatacccagga

SEQ ID NO: 2238 - DNA, 19 bp, Homo sapiens
agcctcaaatacccaggat

SEQ ID NO: 2239 - DNA, 19 bp, Homo sapiens
gcctcaaatacccaggatc

SEQ ID NO: 2240 - DNA, 19 bp, Homo sapiens
cctcaaatacccaggatcg

SEQ ID NO: 2241 - DNA, 19 bp, Homo sapiens
ctcaaatacccaggatcgg

SEQ ID NO: 2242 - DNA, 19 bp, Homo sapiens
tcaaatacccaggatcgga

SEQ ID NO: 2243 - DNA, 19 bp, Homo sapiens
caaatacccaggatcggat

SEQ ID NO: 2244 - DNA, 19 bp, Homo sapiens
aaatacccaggatcggatg

SEQ ID NO: 2245 - DNA, 19 bp, Homo sapiens
aatacccaggatcggatgg

SEQ ID NO: 2246 - DNA, 19 bp, Homo sapiens
atacccaggatcggatgga

SEQ ID NO: 2247 - DNA, 19 bp, Homo sapiens
tacccaggatcggatggat

SEQ ID NO: 2248 - DNA, 19 bp, Homo sapiens
acccaggatcggatggatt

SEQ ID NO: 2249 - DNA, 19 bp, Homo sapiens
cccaggatcggatggattc

SEQ ID NO: 2250 - DNA, 19 bp, Homo sapiens
ccaggatcggatggattcc

SEQ ID NO: 2251 - DNA, 19 bp, Homo sapiens
caggatcggatggattcct

SEQ ID NO: 2252 - DNA, 19 bp, Homo sapiens
aggatcggatggattcctc

SEQ ID NO: 2253 - DNA, 19 bp, Homo sapiens
ggatcggatggattcctct

SEQ ID NO: 2254 - DNA, 19 bp, Homo sapiens
gatcggatggattcctctg

SEQ ID NO: 2255 - DNA, 19 bp, Homo sapiens
atcggatggattcctctga

SEQ ID NO: 2256 - DNA, 19 bp, Homo sapiens
tcggatggattcctctgaa

SEQ ID NO: 2257 - DNA, 19 bp, Homo sapiens
cggatggattcctctgaaa

SEQ ID NO: 2258 - DNA, 19 bp, Homo sapiens
ggatggattcctctgaaat

SEQ ID NO: 2259 - DNA, 19 bp, Homo sapiens
gatggattcctctgaaatc

SEQ ID NO: 2260 - DNA, 19 bp, Homo sapiens
atggattcctctgaaatct

SEQ ID NO: 2261 - DNA, 19 bp, Homo sapiens
tggattcctctgaaatcta

SEQ ID NO: 2262 - DNA, 19 bp, Homo sapiens
ggattcctctgaaatctac

SEQ ID NO: 2263 - DNA, 19 bp, Homo sapiens
gattcctctgaaatctaca

SEQ ID NO: 2264 - DNA, 19 bp, Homo sapiens
attcctctgaaatctacac

SEQ ID NO: 2265 - DNA, 19 bp, Homo sapiens
ttcctctgaaatctacacc

SEQ ID NO: 2266 - DNA, 19 bp, Homo sapiens
tcctctgaaatctacacca

SEQ ID NO: 2267 - DNA, 19 bp, Homo sapiens
cctctgaaatctacaccaa

SEQ ID NO: 2268 - DNA, 19 bp, Homo sapiens
ctctgaaatctacaccaac

SEQ ID NO: 2269 - DNA, 19 bp, Homo sapiens
tctgaaatctacaccaaca

SEQ ID NO: 2270 - DNA, 19 bp, Homo sapiens
ctgaaatctacaccaacac

SEQ ID NO: 2271 - DNA, 19 bp, Homo sapiens
tgaaatctacaccaacacc

SEQ ID NO: 2272 - DNA, 19 bp, Homo sapiens
gaaatctacaccaacacct

SEQ ID NO: 2273 - DNA, 19 bp, Homo sapiens
aaatctacaccaacaccta

SEQ ID NO: 2274 - DNA, 19 bp, Homo sapiens
aatctacaccaacacctat

SEQ ID NO: 2275 - DNA, 19 bp, Homo sapiens
atctacaccaacacctatg

SEQ ID NO: 2276 - DNA, 19 bp, Homo sapiens
tctacaccaacacctatgc

SEQ ID NO: 2277 - DNA, 19 bp, Homo sapiens
ctacaccaacacctatgca

SEQ ID NO: 2278 - DNA, 19 bp, Homo sapiens
tacaccaacacctatgcag

SEQ ID NO: 2279 - DNA, 19 bp, Homo sapiens
acaccaacacctatgcagc

SEQ ID NO: 2280 - DNA, 19 bp, Homo sapiens
caccaacacctatgcagcc

SEQ ID NO: 2281 - DNA, 19 bp, Homo sapiens
accaacacctatgcagccg

SEQ ID NO: 2282 - DNA, 19 bp, Homo sapiens
ccaacacctatgcagccgg

SEQ ID NO: 2283 - DNA, 19 bp, Homo sapiens
caacacctatgcagccggg

SEQ ID NO: 2284 - DNA, 19 bp, Homo sapiens
aacacctatgcagccgggg

SEQ ID NO: 2285 - DNA, 19 bp, Homo sapiens
acacctatgcagccggggg

SEQ ID NO: 2286 - DNA, 19 bp, Homo sapiens
cacctatgcagccgggggc

SEQ ID NO: 2287 - DNA, 19 bp, Homo sapiens
acctatgcagccgggggca

SEQ ID NO: 2288 - DNA, 19 bp, Homo sapiens
cctatgcagccgggggcac

SEQ ID NO: 2289 - DNA, 19 bp, Homo sapiens
ctatgcagccgggggcacg

SEQ ID NO: 2290 - DNA, 19 bp, Homo sapiens
tatgcagccgggggcacgg

SEQ ID NO: 2291 - DNA, 19 bp, Homo sapiens
atgcagccgggggcacggt

SEQ ID NO: 2292 - DNA, 19 bp, Homo sapiens
tgcagccgggggcacggtg

SEQ ID NO: 2293 - DNA, 19 bp, Homo sapiens
gcagccgggggcacggtgg

SEQ ID NO: 2294 - DNA, 19 bp, Homo sapiens
cagccgggggcacggtgga

SEQ ID NO: 2295 - DNA, 19 bp, Homo sapiens
agccgggggcacggtggaa

SEQ ID NO: 2296 - DNA, 19 bp, Homo sapiens
gccgggggcacggtggaag

SEQ ID NO: 2297 - DNA, 19 bp, Homo sapiens
ccgggggcacggtggaagg

SEQ ID NO: 2298 - DNA, 19 bp, Homo sapiens
cgggggcacggtggaagga

SEQ ID NO: 2299 - DNA, 19 bp, Homo sapiens
gggggcacggtggaaggag

SEQ ID NO: 2300 - DNA, 19 bp, Homo sapiens
ggggcacggtggaaggagg

SEQ ID NO: 2301 - DNA, 19 bp, Homo sapiens
gggcacggtggaaggaggt

SEQ ID NO: 2302 - DNA, 19 bp, Homo sapiens
ggcacggtggaaggaggtg

SEQ ID NO: 2303 - DNA, 19 bp, Homo sapiens
gcacggtggaaggaggtgt

SEQ ID NO: 2304 - DNA, 19 bp, Homo sapiens
cacggtggaaggaggtgta

SEQ ID NO: 2305 - DNA, 19 bp, Homo sapiens
acggtggaaggaggtgtat

SEQ ID NO: 2306 - DNA, 19 bp, Homo sapiens
cggtggaaggaggtgtatc

SEQ ID NO: 2307 - DNA, 19 bp, Homo sapiens
ggtggaaggaggtgtatcg

SEQ ID NO: 2308 - DNA, 19 bp, Homo sapiens
gtggaaggaggtgtatcgg

SEQ ID NO: 2309 - DNA, 19 bp, Homo sapiens
tggaaggaggtgtatcggg

SEQ ID NO: 2310 - DNA, 19 bp, Homo sapiens
ggaaggaggtgtatcggga

SEQ ID NO: 2311 - DNA, 19 bp, Homo sapiens
gaaggaggtgtatcgggag

SEQ ID NO: 2312 - DNA, 19 bp, Homo sapiens
aaggaggtgtatcgggagt

SEQ ID NO: 2313 - DNA, 19 bp, Homo sapiens
aggaggtgtatcgggagtg

SEQ ID NO: 2314 - DNA, 19 bp, Homo sapiens
ggaggtgtatcgggagtgg

SEQ ID NO: 2315 - DNA, 19 bp, Homo sapiens
gaggtgtatcgggagtgga

SEQ ID NO: 2316 - DNA, 19 bp, Homo sapiens
aggtgtatcgggagtggag

SEQ ID NO: 2317 - DNA, 19 bp, Homo sapiens
ggtgtatcgggagtggagc

SEQ ID NO: 2318 - DNA, 19 bp, Homo sapiens
gtgtatcgggagtggagct

SEQ ID NO: 2319 - DNA, 19 bp, Homo sapiens
tgtatcgggagtggagctc

SEQ ID NO: 2320 - DNA, 19 bp, Homo sapiens
gtatcgggagtggagctca

SEQ ID NO: 2321 - DNA, 19 bp, Homo sapiens
tatcgggagtggagctcaa

SEQ ID NO: 2322 - DNA, 19 bp, Homo sapiens
atcgggagtggagctcaac

SEQ ID NO: 2323 - DNA, 19 bp, Homo sapiens
tcgggagtggagctcaaca

SEQ ID NO: 2324 - DNA, 19 bp, Homo sapiens
cgggagtggagctcaacac

SEQ ID NO: 2325 - DNA, 19 bp, Homo sapiens
gggagtggagctcaacaca

SEQ ID NO: 2326 - DNA, 19 bp, Homo sapiens
ggagtggagctcaacacag

SEQ ID NO: 2327 - DNA, 19 bp, Homo sapiens
gagtggagctcaacacagg

SEQ ID NO: 2328 - DNA, 19 bp, Homo sapiens
agtggagctcaacacaggt

SEQ ID NO: 2329 - DNA, 19 bp, Homo sapiens
gtggagctcaacacaggta

SEQ ID NO: 2330 - DNA, 19 bp, Homo sapiens
tggagctcaacacaggtat

SEQ ID NO: 2331 - DNA, 19 bp, Homo sapiens
ggagctcaacacaggtatg

SEQ ID NO: 2332 - DNA, 19 bp, Homo sapiens
gagctcaacacaggtatgg

SEQ ID NO: 2333 - DNA, 19 bp, Homo sapiens
agctcaacacaggtatggg

SEQ ID NO: 2334 - DNA, 19 bp, Homo sapiens
gctcaacacaggtatgggg

SEQ ID NO: 2335 - DNA, 19 bp, Homo sapiens
ctcaacacaggtatgggga

SEQ ID NO: 2336 - DNA, 19 bp, Homo sapiens
tcaacacaggtatggggac

SEQ ID NO: 2337 - DNA, 19 bp, Homo sapiens
caacacaggtatggggaca

SEQ ID NO: 2338 - DNA, 19 bp, Homo sapiens
aacacaggtatggggacag

SEQ ID NO: 2339 - DNA, 19 bp, Homo sapiens
acacaggtatggggacagc

SEQ ID NO: 2340 - DNA, 19 bp, Homo sapiens
cacaggtatggggacagcc

SEQ ID NO: 2341 - DNA, 19 bp, Homo sapiens
acaggtatggggacagccg

SEQ ID NO: 2342 - DNA, 19 bp, Homo sapiens
caggtatggggacagccgt

SEQ ID NO: 2343 - DNA, 19 bp, Homo sapiens
aggtatggggacagccgtt

SEQ ID NO: 2344 - DNA, 19 bp, Homo sapiens
ggtatggggacagccgttg

SEQ ID NO: 2345 - DNA, 19 bp, Homo sapiens
gtatggggacagccgttgg

SEQ ID NO: 2346 - DNA, 19 bp, Homo sapiens
tatggggacagccgttggc

SEQ ID NO: 2347 - DNA, 19 bp, Homo sapiens
atggggacagccgttggcc

SEQ ID NO: 2348 - DNA, 19 bp, Homo sapiens
tggggacagccgttggcct

SEQ ID NO: 2349 - DNA, 19 bp, Homo sapiens
ggggacagccgttggcctc

SEQ ID NO: 2350 - DNA, 19 bp, Homo sapiens
gggacagccgttggcctca

SEQ ID NO: 2351 - DNA, 19 bp, Homo sapiens
ggacagccgttggcctcat

SEQ ID NO: 2352 - DNA, 19 bp, Homo sapiens
gacagccgttggcctcatg

SEQ ID NO: 2353 - DNA, 19 bp, Homo sapiens
acagccgttggcctcatgg

SEQ ID NO: 2354 - DNA, 19 bp, Homo sapiens
cagccgttggcctcatggc

SEQ ID NO: 2355 - DNA, 19 bp, Homo sapiens
agccgttggcctcatggcc

SEQ ID NO: 2356 - DNA, 19 bp, Homo sapiens
gccgttggcctcatggccg

SEQ ID NO: 2357 - DNA, 19 bp, Homo sapiens
ccgttggcctcatggccgc

SEQ ID NO: 2358 - DNA, 19 bp, Homo sapiens
cgttggcctcatggccgca

SEQ ID NO: 2359 - DNA, 19 bp, Homo sapiens
gttggcctcatggccgcag

SEQ ID NO: 2360 - DNA, 19 bp, Homo sapiens
ttggcctcatggccgcagg

SEQ ID NO: 2361 - DNA, 19 bp, Homo sapiens
tggcctcatggccgcaggg

SEQ ID NO: 2362 - DNA, 19 bp, Homo sapiens
ggcctcatggccgcagggg

SEQ ID NO: 2363 - DNA, 19 bp, Homo sapiens
gcctcatggccgcaggggc

SEQ ID NO: 2364 - DNA, 19 bp, Homo sapiens
cctcatggccgcaggggcc

SEQ ID NO: 2365 - DNA, 19 bp, Homo sapiens
ctcatggccgcaggggccg

SEQ ID NO: 2366 - DNA, 19 bp, Homo sapiens
tcatggccgcaggggccgc

SEQ ID NO: 2367 - DNA, 19 bp, Homo sapiens
catggccgcaggggccgca

SEQ ID NO: 2368 - DNA, 19 bp, Homo sapiens
atggccgcaggggccgcag

SEQ ID NO: 2369 - DNA, 19 bp, Homo sapiens
tggccgcaggggccgcagg

SEQ ID NO: 2370 - DNA, 19 bp, Homo sapiens
ggccgcaggggccgcagga

SEQ ID NO: 2371 - DNA, 19 bp, Homo sapiens
gccgcaggggccgcaggag

SEQ ID NO: 2372 - DNA, 19 bp, Homo sapiens
ccgcaggggccgcaggagc

SEQ ID NO: 2373 - DNA, 19 bp, Homo sapiens
cgcaggggccgcaggagcc

SEQ ID NO: 2374 - DNA, 19 bp, Homo sapiens
gcaggggccgcaggagcct

SEQ ID NO: 2375 - DNA, 19 bp, Homo sapiens
caggggccgcaggagcctc

SEQ ID NO: 2376 - DNA, 19 bp, Homo sapiens
aggggccgcaggagcctca

SEQ ID NO: 2377 - DNA, 19 bp, Homo sapiens
ggggccgcaggagcctcag

SEQ ID NO: 2378 - DNA, 19 bp, Homo sapiens
gggccgcaggagcctcagg

SEQ ID NO: 2379 - DNA, 19 bp, Homo sapiens
ggccgcaggagcctcaggg

SEQ ID NO: 2380 - DNA, 19 bp, Homo sapiens
gccgcaggagcctcagggg

SEQ ID NO: 2381 - DNA, 19 bp, Homo sapiens
ccgcaggagcctcaggggc

SEQ ID NO: 2382 - DNA, 19 bp, Homo sapiens
cgcaggagcctcaggggcc

SEQ ID NO: 2383 - DNA, 19 bp, Homo sapiens
gcaggagcctcaggggccg

SEQ ID NO: 2384 - DNA, 19 bp, Homo sapiens
caggagcctcaggggccgc

SEQ ID NO: 2385 - DNA, 19 bp, Homo sapiens
aggagcctcaggggccgca

SEQ ID NO: 2386 - DNA, 19 bp, Homo sapiens
ggagcctcaggggccgcaa

SEQ ID NO: 2387 - DNA, 19 bp, Homo sapiens
gagcctcaggggccgcaag

SEQ ID NO: 2388 - DNA, 19 bp, Homo sapiens
agcctcaggggccgcaagg

SEQ ID NO: 2389 - DNA, 19 bp, Homo sapiens
gcctcaggggccgcaagga

SEQ ID NO: 2390 - DNA, 19 bp, Homo sapiens
cctcaggggccgcaaggaa

SEQ ID NO: 2391 - DNA, 19 bp, Homo sapiens
ctcaggggccgcaaggaag

SEQ ID NO: 2392 - DNA, 19 bp, Homo sapiens
tcaggggccgcaaggaaga

SEQ ID NO: 2393 - DNA, 19 bp, Homo sapiens
caggggccgcaaggaagag

SEQ ID NO: 2394 - DNA, 19 bp, Homo sapiens
aggggccgcaaggaagagg

SEQ ID NO: 2395 - DNA, 19 bp, Homo sapiens
ggggccgcaaggaagagga

SEQ ID NO: 2396 - DNA, 19 bp, Homo sapiens
gggccgcaaggaagaggag

SEQ ID NO: 2397 - DNA, 19 bp, Homo sapiens
ggccgcaaggaagaggagc

SEQ ID NO: 2398 - DNA, 19 bp, Homo sapiens
gccgcaaggaagaggagct

SEQ ID NO: 2399 - DNA, 19 bp, Homo sapiens
ccgcaaggaagaggagctc

SEQ ID NO: 2400 - DNA, 19 bp, Homo sapiens
cgcaaggaagaggagctct

SEQ ID NO: 2401 - DNA, 19 bp, Homo sapiens
gcaaggaagaggagctcta

SEQ ID NO: 2402 - DNA, 19 bp, Homo sapiens
caaggaagaggagctctac

SEQ ID NO: 2403 - DNA, 19 bp, Homo sapiens
aaggaagaggagctctacc

SEQ ID NO: 2404 - DNA, 19 bp, Homo sapiens
aggaagaggagctctacca

SEQ ID NO: 2405 - DNA, 19 bp, Homo sapiens
ggaagaggagctctaccat

SEQ ID NO: 2406 - DNA, 19 bp, Homo sapiens
gaagaggagctctaccatg

SEQ ID NO: 2407 - DNA, 19 bp, Homo sapiens
aagaggagctctaccatgg

SEQ ID NO: 2408 - DNA, 19 bp, Homo sapiens
agaggagctctaccatggg

SEQ ID NO: 2409 - DNA, 19 bp, Homo sapiens
gaggagctctaccatggga

SEQ ID NO: 2410 - DNA, 19 bp, Homo sapiens
aggagctctaccatgggaa

SEQ ID NO: 2411 - DNA, 19 bp, Homo sapiens
ggagctctaccatgggaac

SEQ ID NO: 2412 - DNA, 19 bp, Homo sapiens
gagctctaccatgggaacc

SEQ ID NO: 2413 - DNA, 19 bp, Homo sapiens
agctctaccatgggaaccc

SEQ ID NO: 2414 - DNA, 19 bp, Homo sapiens
gctctaccatgggaaccct

SEQ ID NO: 2415 - DNA, 19 bp, Homo sapiens
ctctaccatgggaaccctg

SEQ ID NO: 2416 - DNA, 19 bp, Homo sapiens
tctaccatgggaaccctgc

SEQ ID NO: 2417 - DNA, 19 bp, Homo sapiens
ctaccatgggaaccctgcg

SEQ ID NO: 2418 - DNA, 19 bp, Homo sapiens
taccatgggaaccctgcgg

SEQ ID NO: 2419 - DNA, 19 bp, Homo sapiens
accatgggaaccctgcggg

SEQ ID NO: 2420 - DNA, 19 bp, Homo sapiens
ccatgggaaccctgcggga

SEQ ID NO: 2421 - DNA, 19 bp, Homo sapiens
catgggaaccctgcgggac

SEQ ID NO: 2422 - DNA, 19 bp, Homo sapiens
atgggaaccctgcgggact

SEQ ID NO: 2423 - DNA, 19 bp, Homo sapiens
tgggaaccctgcgggacta

SEQ ID NO: 2424 - DNA, 19 bp, Homo sapiens
gggaaccctgcgggactac

SEQ ID NO: 2425 - DNA, 19 bp, Homo sapiens
ggaaccctgcgggactacg

SEQ ID NO: 2426 - DNA, 19 bp, Homo sapiens
gaaccctgcgggactacgc

SEQ ID NO: 2427 - DNA, 19 bp, Homo sapiens
aaccctgcgggactacgct

SEQ ID NO: 2428 - DNA, 19 bp, Homo sapiens
accctgcgggactacgctg

SEQ ID NO: 2429 - DNA, 19 bp, Homo sapiens
ccctgcgggactacgctga

SEQ ID NO: 2430 - DNA, 19 bp, Homo sapiens
cctgcgggactacgctgac

SEQ ID NO: 2431 - DNA, 19 bp, Homo sapiens
ctgcgggactacgctgacg

SEQ ID NO: 2432 - DNA, 19 bp, Homo sapiens
tgcgggactacgctgacgc

SEQ ID NO: 2433 - DNA, 19 bp, Homo sapiens
gcgggactacgctgacgca

SEQ ID NO: 2434 - DNA, 19 bp, Homo sapiens
cgggactacgctgacgcag

SEQ ID NO: 2435 - DNA, 19 bp, Homo sapiens
gggactacgctgacgcaga

SEQ ID NO: 2436 - DNA, 19 bp, Homo sapiens
ggactacgctgacgcagac

SEQ ID NO: 2437 - DNA, 19 bp, Homo sapiens
gactacgctgacgcagaca

SEQ ID NO: 2438 - DNA, 19 bp, Homo sapiens
actacgctgacgcagacat

SEQ ID NO: 2439 - DNA, 19 bp, Homo sapiens
ctacgctgacgcagacatc

SEQ ID NO: 2440 - DNA, 19 bp, Homo sapiens
tacgctgacgcagacatca

SEQ ID NO: 2441 - DNA, 19 bp, Homo sapiens
acgctgacgcagacatcaa

SEQ ID NO: 2442 - DNA, 19 bp, Homo sapiens
cgctgacgcagacatcaac

SEQ ID NO: 2443 - DNA, 19 bp, Homo sapiens
gctgacgcagacatcaaca

SEQ ID NO: 2444 - DNA, 19 bp, Homo sapiens
ctgacgcagacatcaacat

SEQ ID NO: 2445 - DNA, 19 bp, Homo sapiens
tgacgcagacatcaacatg

SEQ ID NO: 2446 - DNA, 19 bp, Homo sapiens
gacgcagacatcaacatgg

SEQ ID NO: 2447 - DNA, 19 bp, Homo sapiens
acgcagacatcaacatggc

SEQ ID NO: 2448 - DNA, 19 bp, Homo sapiens
cgcagacatcaacatggct

SEQ ID NO: 2449 - DNA, 19 bp, Homo sapiens
gcagacatcaacatggctt

SEQ ID NO: 2450 - DNA, 19 bp, Homo sapiens
cagacatcaacatggcttt

SEQ ID NO: 2451 - DNA, 19 bp, Homo sapiens
agacatcaacatggctttc

SEQ ID NO: 2452 - DNA, 19 bp, Homo sapiens
gacatcaacatggctttct

SEQ ID NO: 2453 - DNA, 19 bp, Homo sapiens
acatcaacatggctttctt

SEQ ID NO: 2454 - DNA, 19 bp, Homo sapiens
catcaacatggctttcttg

SEQ ID NO: 2455 - DNA, 19 bp, Homo sapiens
atcaacatggctttcttgg

SEQ ID NO: 2456 - DNA, 19 bp, Homo sapiens
tcaacatggctttcttgga

SEQ ID NO: 2457 - DNA, 19 bp, Homo sapiens
caacatggctttcttggac

SEQ ID NO: 2458 - DNA, 19 bp, Homo sapiens
aacatggctttcttggaca

SEQ ID NO: 2459 - DNA, 19 bp, Homo sapiens
acatggctttcttggacag

SEQ ID NO: 2460 - DNA, 19 bp, Homo sapiens
catggctttcttggacagc

SEQ ID NO: 2461 - DNA, 19 bp, Homo sapiens
atggctttcttggacagct

SEQ ID NO: 2462 - DNA, 19 bp, Homo sapiens
tggctttcttggacagcta

SEQ ID NO: 2463 - DNA, 19 bp, Homo sapiens
ggctttcttggacagctac

SEQ ID NO: 2464 - DNA, 19 bp, Homo sapiens
gctttcttggacagctact

SEQ ID NO: 2465 - DNA, 19 bp, Homo sapiens
ctttcttggacagctactt

SEQ ID NO: 2466 - DNA, 19 bp, Homo sapiens
tttcttggacagctacttc

SEQ ID NO: 2467 - DNA, 19 bp, Homo sapiens
ttcttggacagctacttct

SEQ ID NO: 2468 - DNA, 19 bp, Homo sapiens
tcttggacagctacttctc

SEQ ID NO: 2469 - DNA, 19 bp, Homo sapiens
cttggacagctacttctcg

SEQ ID NO: 2470 - DNA, 19 bp, Homo sapiens
ttggacagctacttctcgg

SEQ ID NO: 2471 - DNA, 19 bp, Homo sapiens
tggacagctacttctcgga

SEQ ID NO: 2472 - DNA, 19 bp, Homo sapiens
ggacagctacttctcggag

SEQ ID NO: 2473 - DNA, 19 bp, Homo sapiens
gacagctacttctcggaga

SEQ ID NO: 2474 - DNA, 19 bp, Homo sapiens
acagctacttctcggagaa

SEQ ID NO: 2475 - DNA, 19 bp, Homo sapiens
cagctacttctcggagaaa

SEQ ID NO: 2476 - DNA, 19 bp, Homo sapiens
agctacttctcggagaaag

SEQ ID NO: 2477 - DNA, 19 bp, Homo sapiens
gctacttctcggagaaagc

SEQ ID NO: 2478 - DNA, 19 bp, Homo sapiens
ctacttctcggagaaagcg

SEQ ID NO: 2479 - DNA, 19 bp, Homo sapiens
tacttctcggagaaagcgt

SEQ ID NO: 2480 - DNA, 19 bp, Homo sapiens
acttctcggagaaagcgta

SEQ ID NO: 2481 - DNA, 19 bp, Homo sapiens
cttctcggagaaagcgtat

SEQ ID NO: 2482 - DNA, 19 bp, Homo sapiens
ttctcggagaaagcgtatg

SEQ ID NO: 2483 - DNA, 19 bp, Homo sapiens
tctcggagaaagcgtatgc

SEQ ID NO: 2484 - DNA, 19 bp, Homo sapiens
ctcggagaaagcgtatgct

SEQ ID NO: 2485 - DNA, 19 bp, Homo sapiens
tcggagaaagcgtatgctt

SEQ ID NO: 2486 - DNA, 19 bp, Homo sapiens
cggagaaagcgtatgctta

SEQ ID NO: 2487 - DNA, 19 bp, Homo sapiens
ggagaaagcgtatgcttat

SEQ ID NO: 2488 - DNA, 19 bp, Homo sapiens
gagaaagcgtatgcttatg

SEQ ID NO: 2489 - DNA, 19 bp, Homo sapiens
agaaagcgtatgcttatgc

SEQ ID NO: 2490 - DNA, 19 bp, Homo sapiens
gaaagcgtatgcttatgca

SEQ ID NO: 2491 - DNA, 19 bp, Homo sapiens
aaagcgtatgcttatgcag

SEQ ID NO: 2492 - DNA, 19 bp, Homo sapiens
aagcgtatgcttatgcaga

SEQ ID NO: 2493 - DNA, 19 bp, Homo sapiens
agcgtatgcttatgcagat

SEQ ID NO: 2494 - DNA, 19 bp, Homo sapiens
gcgtatgcttatgcagatg

SEQ ID NO: 2495 - DNA, 19 bp, Homo sapiens
cgtatgcttatgcagatga

SEQ ID NO: 2496 - DNA, 19 bp, Homo sapiens
gtatgcttatgcagatgaa

SEQ ID NO: 2497 - DNA, 19 bp, Homo sapiens
tatgcttatgcagatgaag

SEQ ID NO: 2498 - DNA, 19 bp, Homo sapiens
atgcttatgcagatgaaga

SEQ ID NO: 2499 - DNA, 19 bp, Homo sapiens
tgcttatgcagatgaagat

SEQ ID NO: 2500 - DNA, 19 bp, Homo sapiens
gcttatgcagatgaagatg

SEQ ID NO: 2501 - DNA, 19 bp, Homo sapiens
cttatgcagatgaagatga

SEQ ID NO: 2502 - DNA, 19 bp, Homo sapiens
ttatgcagatgaagatgaa

SEQ ID NO: 2503 - DNA, 19 bp, Homo sapiens
tatgcagatgaagatgaag

SEQ ID NO: 2504 - DNA, 19 bp, Homo sapiens
atgcagatgaagatgaagg

SEQ ID NO: 2505 - DNA, 19 bp, Homo sapiens
tgcagatgaagatgaaggt

SEQ ID NO: 2506 - DNA, 19 bp, Homo sapiens
gcagatgaagatgaaggtc

SEQ ID NO: 2507 - DNA, 19 bp, Homo sapiens
cagatgaagatgaaggtcg

SEQ ID NO: 2508 - DNA, 19 bp, Homo sapiens
agatgaagatgaaggtcga

SEQ ID NO: 2509 - DNA, 19 bp, Homo sapiens
gatgaagatgaaggtcgac

SEQ ID NO: 2510 - DNA, 19 bp, Homo sapiens
atgaagatgaaggtcgacc

SEQ ID NO: 2511 - DNA, 19 bp, Homo sapiens
tgaagatgaaggtcgacca

SEQ ID NO: 2512 - DNA, 19 bp, Homo sapiens
gaagatgaaggtcgaccag

SEQ ID NO: 2513 - DNA, 19 bp, Homo sapiens
aagatgaaggtcgaccagc

SEQ ID NO: 2514 - DNA, 19 bp, Homo sapiens
agatgaaggtcgaccagcc

SEQ ID NO: 2515 - DNA, 19 bp, Homo sapiens
gatgaaggtcgaccagcca

SEQ ID NO: 2516 - DNA, 19 bp, Homo sapiens
atgaaggtcgaccagccaa

SEQ ID NO: 2517 - DNA, 19 bp, Homo sapiens
tgaaggtcgaccagccaat

SEQ ID NO: 2518 - DNA, 19 bp, Homo sapiens
gaaggtcgaccagccaatg

SEQ ID NO: 2519 - DNA, 19 bp, Homo sapiens
aaggtcgaccagccaatga

SEQ ID NO: 2520 - DNA, 19 bp, Homo sapiens
aggtcgaccagccaatgac

SEQ ID NO: 2521 - DNA, 19 bp, Homo sapiens
ggtcgaccagccaatgact

SEQ ID NO: 2522 - DNA, 19 bp, Homo sapiens
gtcgaccagccaatgactg

SEQ ID NO: 2523 - DNA, 19 bp, Homo sapiens
tcgaccagccaatgactgc

SEQ ID NO: 2524 - DNA, 19 bp, Homo sapiens
cgaccagccaatgactgct

SEQ ID NO: 2525 - DNA, 19 bp, Homo sapiens
gaccagccaatgactgctt

SEQ ID NO: 2526 - DNA, 19 bp, Homo sapiens
accagccaatgactgcttg

SEQ ID NO: 2527 - DNA, 19 bp, Homo sapiens
ccagccaatgactgcttgc

SEQ ID NO: 2528 - DNA, 19 bp, Homo sapiens
cagccaatgactgcttgct

SEQ ID NO: 2529 - DNA, 19 bp, Homo sapiens
agccaatgactgcttgctc

SEQ ID NO: 2530 - DNA, 19 bp, Homo sapiens
gccaatgactgcttgctca

SEQ ID NO: 2531 - DNA, 19 bp, Homo sapiens
ccaatgactgcttgctcat

SEQ ID NO: 2532 - DNA, 19 bp, Homo sapiens
caatgactgcttgctcatt

SEQ ID NO: 2533 - DNA, 19 bp, Homo sapiens
aatgactgcttgctcattt

SEQ ID NO: 2534 - DNA, 19 bp, Homo sapiens
atgactgcttgctcattta

SEQ ID NO: 2535 - DNA, 19 bp, Homo sapiens
tgactgcttgctcatttat

SEQ ID NO: 2536 - DNA, 19 bp, Homo sapiens
gactgcttgctcatttatg

SEQ ID NO: 2537 - DNA, 19 bp, Homo sapiens
actgcttgctcatttatga

SEQ ID NO: 2538 - DNA, 19 bp, Homo sapiens
ctgcttgctcatttatgac

SEQ ID NO: 2539 - DNA, 19 bp, Homo sapiens
tgcttgctcatttatgacc

SEQ ID NO: 2540 - DNA, 19 bp, Homo sapiens
gcttgctcatttatgacca

SEQ ID NO: 2541 - DNA, 19 bp, Homo sapiens
cttgctcatttatgaccac

SEQ ID NO: 2542 - DNA, 19 bp, Homo sapiens
ttgctcatttatgaccacg

SEQ ID NO: 2543 - DNA, 19 bp, Homo sapiens
tgctcatttatgaccacga

SEQ ID NO: 2544 - DNA, 19 bp, Homo sapiens
gctcatttatgaccacgag

SEQ ID NO: 2545 - DNA, 19 bp, Homo sapiens
ctcatttatgaccacgagg

SEQ ID NO: 2546 - DNA, 19 bp, Homo sapiens
tcatttatgaccacgaggg

SEQ ID NO: 2547 - DNA, 19 bp, Homo sapiens
catttatgaccacgaggga

SEQ ID NO: 2548 - DNA, 19 bp, Homo sapiens
atttatgaccacgagggag

SEQ ID NO: 2549 - DNA, 19 bp, Homo sapiens
tttatgaccacgagggagt

SEQ ID NO: 2550 - DNA, 19 bp, Homo sapiens
ttatgaccacgagggagtc

SEQ ID NO: 2551 - DNA, 19 bp, Homo sapiens
tatgaccacgagggagtcg

SEQ ID NO: 2552 - DNA, 19 bp, Homo sapiens
atgaccacgagggagtcgg

SEQ ID NO: 2553 - DNA, 19 bp, Homo sapiens
tgaccacgagggagtcggg

SEQ ID NO: 2554 - DNA, 19 bp, Homo sapiens
gaccacgagggagtcgggt

SEQ ID NO: 2555 - DNA, 19 bp, Homo sapiens
accacgagggagtcgggtc

SEQ ID NO: 2556 - DNA, 19 bp, Homo sapiens
ccacgagggagtcgggtct

SEQ ID NO: 2557 - DNA, 19 bp, Homo sapiens
cacgagggagtcgggtctc

SEQ ID NO: 2558 - DNA, 19 bp, Homo sapiens
acgagggagtcgggtctcc

SEQ ID NO: 2559 - DNA, 19 bp, Homo sapiens
cgagggagtcgggtctccc

SEQ ID NO: 2560 - DNA, 19 bp, Homo sapiens
gagggagtcgggtctcccg

SEQ ID NO: 2561 - DNA, 19 bp, Homo sapiens
agggagtcgggtctcccgt

SEQ ID NO: 2562 - DNA, 19 bp, Homo sapiens
gggagtcgggtctcccgta

SEQ ID NO: 2563 - DNA, 19 bp, Homo sapiens
ggagtcgggtctcccgtag

SEQ ID NO: 2564 - DNA, 19 bp, Homo sapiens
gagtcgggtctcccgtagg

SEQ ID NO: 2565 - DNA, 19 bp, Homo sapiens
agtcgggtctcccgtaggc

SEQ ID NO: 2566 - DNA, 19 bp, Homo sapiens
gtcgggtctcccgtaggct

SEQ ID NO: 2567 - DNA, 19 bp, Homo sapiens
tcgggtctcccgtaggctc

SEQ ID NO: 2568 - DNA, 19 bp, Homo sapiens
cgggtctcccgtaggctct

SEQ ID NO: 2569 - DNA, 19 bp, Homo sapiens
gggtctcccgtaggctcta

SEQ ID NO: 2570 - DNA, 19 bp, Homo sapiens
ggtctcccgtaggctctat

SEQ ID NO: 2571 - DNA, 19 bp, Homo sapiens
gtctcccgtaggctctatt

SEQ ID NO: 2572 - DNA, 19 bp, Homo sapiens
tctcccgtaggctctattg

SEQ ID NO: 2573 - DNA, 19 bp, Homo sapiens
ctcccgtaggctctattgg

SEQ ID NO: 2574 - DNA, 19 bp, Homo sapiens
tcccgtaggctctattggt

SEQ ID NO: 2575 - DNA, 19 bp, Homo sapiens
cccgtaggctctattggtt

SEQ ID NO: 2576 - DNA, 19 bp, Homo sapiens
ccgtaggctctattggttg

SEQ ID NO: 2577 - DNA, 19 bp, Homo sapiens
cgtaggctctattggttgt

SEQ ID NO: 2578 - DNA, 19 bp, Homo sapiens
gtaggctctattggttgtt

SEQ ID NO: 2579 - DNA, 19 bp, Homo sapiens
taggctctattggttgttg

SEQ ID NO: 2580 - DNA, 19 bp, Homo sapiens
aggctctattggttgttgc

SEQ ID NO: 2581 - DNA, 19 bp, Homo sapiens
ggctctattggttgttgca

SEQ ID NO: 2582 - DNA, 19 bp, Homo sapiens
gctctattggttgttgcag

SEQ ID NO: 2583 - DNA, 19 bp, Homo sapiens
ctctattggttgttgcagt

SEQ ID NO: 2584 - DNA, 19 bp, Homo sapiens
tctattggttgttgcagtt

SEQ ID NO: 2585 - DNA, 19 bp, Homo sapiens
ctattggttgttgcagttg

SEQ ID NO: 2586 - DNA, 19 bp, Homo sapiens
tattggttgttgcagttgg

SEQ ID NO: 2587 - DNA, 19 bp, Homo sapiens
attggttgttgcagttgga

SEQ ID NO: 2588 - DNA, 19 bp, Homo sapiens
ttggttgttgcagttggat

SEQ ID NO: 2589 - DNA, 19 bp, Homo sapiens
tggttgttgcagttggatt

SEQ ID NO: 2590 - DNA, 19 bp, Homo sapiens
ggttgttgcagttggattg

SEQ ID NO: 2591 - DNA, 19 bp, Homo sapiens
gttgttgcagttggattgt

SEQ ID NO: 2592 - DNA, 19 bp, Homo sapiens
ttgttgcagttggattgtg

SEQ ID NO: 2593 - DNA, 19 bp, Homo sapiens
tgttgcagttggattgtgg

SEQ ID NO: 2594 - DNA, 19 bp, Homo sapiens
gttgcagttggattgtgga

SEQ ID NO: 2595 - DNA, 19 bp, Homo sapiens
ttgcagttggattgtggat

SEQ ID NO: 2596 - DNA, 19 bp, Homo sapiens
tgcagttggattgtggatg

SEQ ID NO: 2597 - DNA, 19 bp, Homo sapiens
gcagttggattgtggatga

SEQ ID NO: 2598 - DNA, 19 bp, Homo sapiens
cagttggattgtggatgac

SEQ ID NO: 2599 - DNA, 19 bp, Homo sapiens
agttggattgtggatgact

SEQ ID NO: 2600 - DNA, 19 bp, Homo sapiens
gttggattgtggatgactt

SEQ ID NO: 2601 - DNA, 19 bp, Homo sapiens
ttggattgtggatgactta

SEQ ID NO: 2602 - DNA, 19 bp, Homo sapiens
tggattgtggatgacttag

SEQ ID NO: 2603 - DNA, 19 bp, Homo sapiens
ggattgtggatgacttaga

SEQ ID NO: 2604 - DNA, 19 bp, Homo sapiens
gattgtggatgacttagat

SEQ ID NO: 2605 - DNA, 19 bp, Homo sapiens
attgtggatgacttagatg

SEQ ID NO: 2606 - DNA, 19 bp, Homo sapiens
ttgtggatgacttagatga

SEQ ID NO: 2607 - DNA, 19 bp, Homo sapiens
tgtggatgacttagatgaa

SEQ ID NO: 2608 - DNA, 19 bp, Homo sapiens
gtggatgacttagatgaaa

SEQ ID NO: 2609 - DNA, 19 bp, Homo sapiens
tggatgacttagatgaaag

SEQ ID NO: 2610 - DNA, 19 bp, Homo sapiens
ggatgacttagatgaaagc

SEQ ID NO: 2611 - DNA, 19 bp, Homo sapiens
gatgacttagatgaaagct

SEQ ID NO: 2612 - DNA, 19 bp, Homo sapiens
atgacttagatgaaagctg

SEQ ID NO: 2613 - DNA, 19 bp, Homo sapiens
tgacttagatgaaagctgc

SEQ ID NO: 2614 - DNA, 19 bp, Homo sapiens
gacttagatgaaagctgca

SEQ ID NO: 2615 - DNA, 19 bp, Homo sapiens
acttagatgaaagctgcat

SEQ ID NO: 2616 - DNA, 19 bp, Homo sapiens
cttagatgaaagctgcatg

SEQ ID NO: 2617 - DNA, 19 bp, Homo sapiens
ttagatgaaagctgcatgg

SEQ ID NO: 2618 - DNA, 19 bp, Homo sapiens
tagatgaaagctgcatgga

SEQ ID NO: 2619 - DNA, 19 bp, Homo sapiens
agatgaaagctgcatggaa

SEQ ID NO: 2620 - DNA, 19 bp, Homo sapiens
gatgaaagctgcatggaaa

SEQ ID NO: 2621 - DNA, 19 bp, Homo sapiens
atgaaagctgcatggaaac

SEQ ID NO: 2622 - DNA, 19 bp, Homo sapiens
tgaaagctgcatggaaact

SEQ ID NO: 2623 - DNA, 19 bp, Homo sapiens
gaaagctgcatggaaactt

SEQ ID NO: 2624 - DNA, 19 bp, Homo sapiens
aaagctgcatggaaacttt

SEQ ID NO: 2625 - DNA, 19 bp, Homo sapiens
aagctgcatggaaacttta

SEQ ID NO: 2626 - DNA, 19 bp, Homo sapiens
agctgcatggaaactttag

SEQ ID NO: 2627 - DNA, 19 bp, Homo sapiens
gctgcatggaaactttaga

SEQ ID NO: 2628 - DNA, 19 bp, Homo sapiens
ctgcatggaaactttagat

SEQ ID NO: 2629 - DNA, 19 bp, Homo sapiens
tgcatggaaactttagatc

SEQ ID NO: 2630 - DNA, 19 bp, Homo sapiens
gcatggaaactttagatcc

SEQ ID NO: 2631 - DNA, 19 bp, Homo sapiens
catggaaactttagatcca

SEQ ID NO: 2632 - DNA, 19 bp, Homo sapiens
atggaaactttagatccaa

SEQ ID NO: 2633 - DNA, 19 bp, Homo sapiens
tggaaactttagatccaaa

SEQ ID NO: 2634 - DNA, 19 bp, Homo sapiens
ggaaactttagatccaaaa

SEQ ID NO: 2635 - DNA, 19 bp, Homo sapiens
gaaactttagatccaaaat

SEQ ID NO: 2636 - DNA, 19 bp, Homo sapiens
aaactttagatccaaaatt

SEQ ID NO: 2637 - DNA, 19 bp, Homo sapiens
aactttagatccaaaattt

SEQ ID NO: 2638 - DNA, 19 bp, Homo sapiens
actttagatccaaaattta

SEQ ID NO: 2639 - DNA, 19 bp, Homo sapiens
ctttagatccaaaatttag

SEQ ID NO: 2640 - DNA, 19 bp, Homo sapiens
tttagatccaaaatttagg

SEQ ID NO: 2641 - DNA, 19 bp, Homo sapiens
ttagatccaaaatttagga

SEQ ID NO: 2642 - DNA, 19 bp, Homo sapiens
tagatccaaaatttaggac

SEQ ID NO: 2643 - DNA, 19 bp, Homo sapiens
agatccaaaatttaggact

SEQ ID NO: 2644 - DNA, 19 bp, Homo sapiens
gatccaaaatttaggactc

SEQ ID NO: 2645 - DNA, 19 bp, Homo sapiens
atccaaaatttaggactct

SEQ ID NO: 2646 - DNA, 19 bp, Homo sapiens
tccaaaatttaggactctt

SEQ ID NO: 2647 - DNA, 19 bp, Homo sapiens
ccaaaatttaggactcttg

SEQ ID NO: 2648 - DNA, 19 bp, Homo sapiens
caaaatttaggactcttgc

SEQ ID NO: 2649 - DNA, 19 bp, Homo sapiens
aaaatttaggactcttgct

SEQ ID NO: 2650 - DNA, 19 bp, Homo sapiens
aaatttaggactcttgctg

SEQ ID NO: 2651 - DNA, 19 bp, Homo sapiens
aatttaggactcttgctga

SEQ ID NO: 2652 - DNA, 19 bp, Homo sapiens
atttaggactcttgctgag

SEQ ID NO: 2653 - DNA, 19 bp, Homo sapiens
tttaggactcttgctgaga

SEQ ID NO: 2654 - DNA, 19 bp, Homo sapiens
ttaggactcttgctgagat

SEQ ID NO: 2655 - DNA, 19 bp, Homo sapiens
taggactcttgctgagatc

SEQ ID NO: 2656 - DNA, 19 bp, Homo sapiens
aggactcttgctgagatct

SEQ ID NO: 2657 - DNA, 19 bp, Homo sapiens
ggactcttgctgagatctg

SEQ ID NO: 2658 - DNA, 19 bp, Homo sapiens
gactcttgctgagatctgc

SEQ ID NO: 2659 - DNA, 19 bp, Homo sapiens
actcttgctgagatctgct

SEQ ID NO: 2660 - DNA, 19 bp, Homo sapiens
ctcttgctgagatctgctt

SEQ ID NO: 2661 - DNA, 19 bp, Homo sapiens
tcttgctgagatctgctta

SEQ ID NO: 2662 - DNA, 19 bp, Homo sapiens
cttgctgagatctgcttaa

SEQ ID NO: 2663 - DNA, 19 bp, Homo sapiens
ttgctgagatctgcttaaa

SEQ ID NO: 2664 - DNA, 19 bp, Homo sapiens
tgctgagatctgcttaaac

SEQ ID NO: 2665 - DNA, 19 bp, Homo sapiens
gctgagatctgcttaaaca

SEQ ID NO: 2666 - DNA, 19 bp, Homo sapiens
ctgagatctgcttaaacac

SEQ ID NO: 2667 - DNA, 19 bp, Homo sapiens
tgagatctgcttaaacaca

SEQ ID NO: 2668 - DNA, 19 bp, Homo sapiens
gagatctgcttaaacacag

SEQ ID NO: 2669 - DNA, 19 bp, Homo sapiens
agatctgcttaaacacaga

SEQ ID NO: 2670 - DNA, 19 bp, Homo sapiens
gatctgcttaaacacagaa

SEQ ID NO: 2671 - DNA, 19 bp, Homo sapiens
atctgcttaaacacagaaa

SEQ ID NO: 2672 - DNA, 19 bp, Homo sapiens
tctgcttaaacacagaaat

SEQ ID NO: 2673 - DNA, 19 bp, Homo sapiens
ctgcttaaacacagaaatt

SEQ ID NO: 2674 - DNA, 19 bp, Homo sapiens
tgcttaaacacagaaattg

SEQ ID NO: 2675 - DNA, 19 bp, Homo sapiens
gcttaaacacagaaattga

SEQ ID NO: 2676 - DNA, 19 bp, Homo sapiens
cttaaacacagaaattgaa

SEQ ID NO: 2677 - DNA, 19 bp, Homo sapiens
ttaaacacagaaattgaac

SEQ ID NO: 2678 - DNA, 19 bp, Homo sapiens
taaacacagaaattgaacc

SEQ ID NO: 2679 - DNA, 19 bp, Homo sapiens
aaacacagaaattgaacca

SEQ ID NO: 2680 - DNA, 19 bp, Homo sapiens
aacacagaaattgaaccat

SEQ ID NO: 2681 - DNA, 19 bp, Homo sapiens
acacagaaattgaaccatt

SEQ ID NO: 2682 - DNA, 19 bp, Homo sapiens
cacagaaattgaaccattt

SEQ ID NO: 2683 - DNA, 19 bp, Homo sapiens
acagaaattgaaccatttc

SEQ ID NO: 2684 - DNA, 19 bp, Homo sapiens
cagaaattgaaccatttcc

SEQ ID NO: 2685 - DNA, 19 bp, Homo sapiens
agaaattgaaccatttcct

SEQ ID NO: 2686 - DNA, 19 bp, Homo sapiens
gaaattgaaccatttcctt

SEQ ID NO: 2687 - DNA, 19 bp, Homo sapiens
aaattgaaccatttccttc

SEQ ID NO: 2688 - DNA, 19 bp, Homo sapiens
aattgaaccatttccttca

SEQ ID NO: 2689 - DNA, 19 bp, Homo sapiens
attgaaccatttccttcac

SEQ ID NO: 2690 - DNA, 19 bp, Homo sapiens
ttgaaccatttccttcaca

SEQ ID NO: 2691 - DNA, 19 bp, Homo sapiens
tgaaccatttccttcacac

SEQ ID NO: 2692 - DNA, 19 bp, Homo sapiens
gaaccatttccttcacacc

SEQ ID NO: 2693 - DNA, 19 bp, Homo sapiens
aaccatttccttcacacca

SEQ ID NO: 2694 - DNA, 19 bp, Homo sapiens
accatttccttcacaccag

SEQ ID NO: 2695 - DNA, 19 bp, Homo sapiens
ccatttccttcacaccagg

SEQ ID NO: 2696 - DNA, 19 bp, Homo sapiens
catttccttcacaccaggc

SEQ ID NO: 2697 - DNA, 19 bp, Homo sapiens
atttccttcacaccaggct

SEQ ID NO: 2698 - DNA, 19 bp, Homo sapiens
tttccttcacaccaggctt

SEQ ID NO: 2699 - DNA, 19 bp, Homo sapiens
ttccttcacaccaggcttg

SEQ ID NO: 2700 - DNA, 19 bp, Homo sapiens
tccttcacaccaggcttgt

SEQ ID NO: 2701 - DNA, 19 bp, Homo sapiens
ccttcacaccaggcttgta

SEQ ID NO: 2702 - DNA, 19 bp, Homo sapiens
cttcacaccaggcttgtat

SEQ ID NO: 2703 - DNA, 19 bp, Homo sapiens
ttcacaccaggcttgtata

SEQ ID NO: 2704 - DNA, 19 bp, Homo sapiens
tcacaccaggcttgtatac

SEQ ID NO: 2705 - DNA, 19 bp, Homo sapiens
cacaccaggcttgtatacc

SEQ ID NO: 2706 - DNA, 19 bp, Homo sapiens
acaccaggcttgtatacca

SEQ ID NO: 2707 - DNA, 19 bp, Homo sapiens
caccaggcttgtataccaa

SEQ ID NO: 2708 - DNA, 19 bp, Homo sapiens
accaggcttgtataccaat

SEQ ID NO: 2709 - DNA, 19 bp, Homo sapiens
ccaggcttgtataccaatc

SEQ ID NO: 2710 - DNA, 19 bp, Homo sapiens
caggcttgtataccaatca

SEQ ID NO: 2711 - DNA, 19 bp, Homo sapiens
aggcttgtataccaatcag

SEQ ID NO: 2712 - DNA, 19 bp, Homo sapiens
ggcttgtataccaatcagt

SEQ ID NO: 2713 - DNA, 19 bp, Homo sapiens
gcttgtataccaatcagta

SEQ ID NO: 2714 - DNA, 19 bp, Homo sapiens
cttgtataccaatcagtac

SEQ ID NO: 2715 - DNA, 19 bp, Homo sapiens
ttgtataccaatcagtact

SEQ ID NO: 2716 - DNA, 19 bp, Homo sapiens
tgtataccaatcagtactg

SEQ ID NO: 2717 - DNA, 19 bp, Homo sapiens
gtataccaatcagtactga

SEQ ID NO: 2718 - DNA, 19 bp, Homo sapiens
tataccaatcagtactgac

SEQ ID NO: 2719 - DNA, 19 bp, Homo sapiens
ataccaatcagtactgacc

SEQ ID NO: 2720 - DNA, 19 bp, Homo sapiens
taccaatcagtactgacct

SEQ ID NO: 2721 - DNA, 19 bp, Homo sapiens
accaatcagtactgacctc

SEQ ID NO: 2722 - DNA, 19 bp, Homo sapiens
ccaatcagtactgacctcc

SEQ ID NO: 2723 - DNA, 19 bp, Homo sapiens
caatcagtactgacctccc

SEQ ID NO: 2724 - DNA, 19 bp, Homo sapiens
aatcagtactgacctccct

SEQ ID NO: 2725 - DNA, 19 bp, Homo sapiens
atcagtactgacctccctt

SEQ ID NO: 2726 - DNA, 19 bp, Homo sapiens
tcagtactgacctcccttt

SEQ ID NO: 2727 - DNA, 19 bp, Homo sapiens
cagtactgacctccctttg

SEQ ID NO: 2728 - DNA, 19 bp, Homo sapiens
agtactgacctccctttgc

SEQ ID NO: 2729 - DNA, 19 bp, Homo sapiens
gtactgacctccctttgct

SEQ ID NO: 2730 - DNA, 19 bp, Homo sapiens
tactgacctccctttgctc

SEQ ID NO: 2731 - DNA, 19 bp, Homo sapiens
actgacctccctttgctcg

SEQ ID NO: 2732 - DNA, 19 bp, Homo sapiens
ctgacctccctttgctcgg

SEQ ID NO: 2733 - DNA, 19 bp, Homo sapiens
tgacctccctttgctcgga

SEQ ID NO: 2734 - DNA, 19 bp, Homo sapiens
gacctccctttgctcggac

SEQ ID NO: 2735 - DNA, 19 bp, Homo sapiens
acctccctttgctcggacc

SEQ ID NO: 2736 - DNA, 19 bp, Homo sapiens
cctccctttgctcggacct

SEQ ID NO: 2737 - DNA, 19 bp, Homo sapiens
ctccctttgctcggaccta

SEQ ID NO: 2738 - DNA, 19 bp, Homo sapiens
tccctttgctcggacctaa

SEQ ID NO: 2739 - DNA, 19 bp, Homo sapiens
ccctttgctcggacctaat

SEQ ID NO: 2740 - DNA, 19 bp, Homo sapiens
cctttgctcggacctaatt

SEQ ID NO: 2741 - DNA, 19 bp, Homo sapiens
ctttgctcggacctaatta

SEQ ID NO: 2742 - DNA, 19 bp, Homo sapiens
tttgctcggacctaattac

SEQ ID NO: 2743 - DNA, 19 bp, Homo sapiens
ttgctcggacctaattact

SEQ ID NO: 2744 - DNA, 19 bp, Homo sapiens
tgctcggacctaattactt

SEQ ID NO: 2745 - DNA, 19 bp, Homo sapiens
gctcggacctaattacttt

SEQ ID NO: 2746 - DNA, 19 bp, Homo sapiens
ctcggacctaattactttg

SEQ ID NO: 2747 - DNA, 19 bp, Homo sapiens
tcggacctaattactttgt

SEQ ID NO: 2748 - DNA, 19 bp, Homo sapiens
cggacctaattactttgtt

SEQ ID NO: 2749 - DNA, 19 bp, Homo sapiens
ggacctaattactttgtta

SEQ ID NO: 2750 - DNA, 19 bp, Homo sapiens
gacctaattactttgttaa

SEQ ID NO: 2751 - DNA, 19 bp, Homo sapiens
acctaattactttgttaat

SEQ ID NO: 2752 - DNA, 19 bp, Homo sapiens
cctaattactttgttaatg

SEQ ID NO: 2753 - DNA, 19 bp, Homo sapiens
ctaattactttgttaatga

SEQ ID NO: 2754 - DNA, 19 bp, Homo sapiens
taattactttgttaatgaa

SEQ ID NO: 2755 - DNA, 19 bp, Homo sapiens
aattactttgttaatgaat

SEQ ID NO: 2756 - DNA, 19 bp, Homo sapiens
attactttgttaatgaatc

SEQ ID NO: 2757 - DNA, 19 bp, Homo sapiens
ttactttgttaatgaatct

SEQ ID NO: 2758 - DNA, 19 bp, Homo sapiens
tactttgttaatgaatctt

SEQ ID NO: 2759 - DNA, 19 bp, Homo sapiens
actttgttaatgaatcttc

SEQ ID NO: 2760 - DNA, 19 bp, Homo sapiens
ctttgttaatgaatcttca

SEQ ID NO: 2761 - DNA, 19 bp, Homo sapiens
tttgttaatgaatcttcag

SEQ ID NO: 2762 - DNA, 19 bp, Homo sapiens
ttgttaatgaatcttcagg

SEQ ID NO: 2763 - DNA, 19 bp, Homo sapiens
tgttaatgaatcttcagga

SEQ ID NO: 2764 - DNA, 19 bp, Homo sapiens
gttaatgaatcttcaggat

SEQ ID NO: 2765 - DNA, 19 bp, Homo sapiens
ttaatgaatcttcaggatt

SEQ ID NO: 2766 - DNA, 19 bp, Homo sapiens
taatgaatcttcaggattg

SEQ ID NO: 2767 - DNA, 19 bp, Homo sapiens
aatgaatcttcaggattga

SEQ ID NO: 2768 - DNA, 19 bp, Homo sapiens
atgaatcttcaggattgac

SEQ ID NO: 2769 - DNA, 19 bp, Homo sapiens
tgaatcttcaggattgact

SEQ ID NO: 2770 - DNA, 19 bp, Homo sapiens
gaatcttcaggattgactc

SEQ ID NO: 2771 - DNA, 19 bp, Homo sapiens
aatcttcaggattgactcc

SEQ ID NO: 2772 - DNA, 19 bp, Homo sapiens
atcttcaggattgactccc

SEQ ID NO: 2773 - DNA, 19 bp, Homo sapiens
tcttcaggattgactccct

SEQ ID NO: 2774 - DNA, 19 bp, Homo sapiens
cttcaggattgactccctc

SEQ ID NO: 2775 - DNA, 19 bp, Homo sapiens
ttcaggattgactccctca

SEQ ID NO: 2776 - DNA, 19 bp, Homo sapiens
tcaggattgactccctcag

SEQ ID NO: 2777 - DNA, 19 bp, Homo sapiens
caggattgactccctcaga

SEQ ID NO: 2778 - DNA, 19 bp, Homo sapiens
aggattgactccctcagaa

SEQ ID NO: 2779 - DNA, 19 bp, Homo sapiens
ggattgactccctcagaag

SEQ ID NO: 2780 - DNA, 19 bp, Homo sapiens
gattgactccctcagaagt

SEQ ID NO: 2781 - DNA, 19 bp, Homo sapiens
attgactccctcagaagtt

SEQ ID NO: 2782 - DNA, 19 bp, Homo sapiens
ttgactccctcagaagttg

SEQ ID NO: 2783 - DNA, 19 bp, Homo sapiens
tgactccctcagaagttga

SEQ ID NO: 2784 - DNA, 19 bp, Homo sapiens
gactccctcagaagttgaa

SEQ ID NO: 2785 - DNA, 19 bp, Homo sapiens
actccctcagaagttgaat

SEQ ID NO: 2786 - DNA, 19 bp, Homo sapiens
ctccctcagaagttgaatt

SEQ ID NO: 2787 - DNA, 19 bp, Homo sapiens
tccctcagaagttgaattc

SEQ ID NO: 2788 - DNA, 19 bp, Homo sapiens
ccctcagaagttgaattcc

SEQ ID NO: 2789 - DNA, 19 bp, Homo sapiens
cctcagaagttgaattcca

SEQ ID NO: 2790 - DNA, 19 bp, Homo sapiens
ctcagaagttgaattccaa

SEQ ID NO: 2791 - DNA, 19 bp, Homo sapiens
tcagaagttgaattccaag

SEQ ID NO: 2792 - DNA, 19 bp, Homo sapiens
cagaagttgaattccaaga

SEQ ID NO: 2793 - DNA, 19 bp, Homo sapiens
agaagttgaattccaagaa

SEQ ID NO: 2794 - DNA, 19 bp, Homo sapiens
gaagttgaattccaagaag

SEQ ID NO: 2795 - DNA, 19 bp, Homo sapiens
aagttgaattccaagaaga

SEQ ID NO: 2796 - DNA, 19 bp, Homo sapiens
agttgaattccaagaagaa

SEQ ID NO: 2797 - DNA, 19 bp, Homo sapiens
gttgaattccaagaagaaa

SEQ ID NO: 2798 - DNA, 19 bp, Homo sapiens
ttgaattccaagaagaaat

SEQ ID NO: 2799 - DNA, 19 bp, Homo sapiens
tgaattccaagaagaaatg

SEQ ID NO: 2800 - DNA, 19 bp, Homo sapiens
gaattccaagaagaaatgg

SEQ ID NO: 2801 - DNA, 19 bp, Homo sapiens
aattccaagaagaaatggc

SEQ ID NO: 2802 - DNA, 19 bp, Homo sapiens
attccaagaagaaatggca

SEQ ID NO: 2803 - DNA, 19 bp, Homo sapiens
ttccaagaagaaatggcag

SEQ ID NO: 2804 - DNA, 19 bp, Homo sapiens
tccaagaagaaatggcagc

SEQ ID NO: 2805 - DNA, 19 bp, Homo sapiens
ccaagaagaaatggcagca

SEQ ID NO: 2806 - DNA, 19 bp, Homo sapiens
caagaagaaatggcagcat

SEQ ID NO: 2807 - DNA, 19 bp, Homo sapiens
aagaagaaatggcagcatc

SEQ ID NO: 2808 - DNA, 19 bp, Homo sapiens
agaagaaatggcagcatct

SEQ ID NO: 2809 - DNA, 19 bp, Homo sapiens
gaagaaatggcagcatctg

SEQ ID NO: 2810 - DNA, 19 bp, Homo sapiens
aagaaatggcagcatctga

SEQ ID NO: 2811 - DNA, 19 bp, Homo sapiens
agaaatggcagcatctgaa

SEQ ID NO: 2812 - DNA, 19 bp, Homo sapiens
gaaatggcagcatctgaac

SEQ ID NO: 2813 - DNA, 19 bp, Homo sapiens
aaatggcagcatctgaacc

SEQ ID NO: 2814 - DNA, 19 bp, Homo sapiens
aatggcagcatctgaaccc

SEQ ID NO: 2815 - DNA, 19 bp, Homo sapiens
atggcagcatctgaacccg

SEQ ID NO: 2816 - DNA, 19 bp, Homo sapiens
tggcagcatctgaacccgt

SEQ ID NO: 2817 - DNA, 19 bp, Homo sapiens
ggcagcatctgaacccgtg

SEQ ID NO: 2818 - DNA, 19 bp, Homo sapiens
gcagcatctgaacccgtgg

SEQ ID NO: 2819 - DNA, 19 bp, Homo sapiens
cagcatctgaacccgtggt

SEQ ID NO: 2820 - DNA, 19 bp, Homo sapiens
agcatctgaacccgtggtc

SEQ ID NO: 2821 - DNA, 19 bp, Homo sapiens
gcatctgaacccgtggtcc

SEQ ID NO: 2822 - DNA, 19 bp, Homo sapiens
catctgaacccgtggtcca

SEQ ID NO: 2823 - DNA, 19 bp, Homo sapiens
atctgaacccgtggtccat

SEQ ID NO: 2824 - DNA, 19 bp, Homo sapiens
tctgaacccgtggtccatg

SEQ ID NO: 2825 - DNA, 19 bp, Homo sapiens
ctgaacccgtggtccatgg

SEQ ID NO: 2826 - DNA, 19 bp, Homo sapiens
tgaacccgtggtccatggg

SEQ ID NO: 2827 - DNA, 19 bp, Homo sapiens
gaacccgtggtccatgggg

SEQ ID NO: 2828 - DNA, 19 bp, Homo sapiens
aacccgtggtccatgggga

SEQ ID NO: 2829 - DNA, 19 bp, Homo sapiens
acccgtggtccatggggat

SEQ ID NO: 2830 - DNA, 19 bp, Homo sapiens
cccgtggtccatggggata

SEQ ID NO: 2831 - DNA, 19 bp, Homo sapiens
ccgtggtccatggggatat

SEQ ID NO: 2832 - DNA, 19 bp, Homo sapiens
cgtggtccatggggatatt

SEQ ID NO: 2833 - DNA, 19 bp, Homo sapiens
gtggtccatggggatatta

SEQ ID NO: 2834 - DNA, 19 bp, Homo sapiens
tggtccatggggatattat

SEQ ID NO: 2835 - DNA, 19 bp, Homo sapiens
ggtccatggggatattatt

SEQ ID NO: 2836 - DNA, 19 bp, Homo sapiens
gtccatggggatattattg

SEQ ID NO: 2837 - DNA, 19 bp, Homo sapiens
tccatggggatattattgt

SEQ ID NO: 2838 - DNA, 19 bp, Homo sapiens
ccatggggatattattgtg

SEQ ID NO: 2839 - DNA, 19 bp, Homo sapiens
catggggatattattgtga

SEQ ID NO: 2840 - DNA, 19 bp, Homo sapiens
atggggatattattgtgac

SEQ ID NO: 2841 - DNA, 19 bp, Homo sapiens
tggggatattattgtgact

SEQ ID NO: 2842 - DNA, 19 bp, Homo sapiens
ggggatattattgtgactg

SEQ ID NO: 2843 - DNA, 19 bp, Homo sapiens
gggatattattgtgactga

SEQ ID NO: 2844 - DNA, 19 bp, Homo sapiens
ggatattattgtgactgag

SEQ ID NO: 2845 - DNA, 19 bp, Homo sapiens
gatattattgtgactgaga

SEQ ID NO: 2846 - DNA, 19 bp, Homo sapiens
atattattgtgactgagac

SEQ ID NO: 2847 - DNA, 19 bp, Homo sapiens
tattattgtgactgagact

SEQ ID NO: 2848 - DNA, 19 bp, Homo sapiens
attattgtgactgagactt

SEQ ID NO: 2849 - DNA, 19 bp, Homo sapiens
ttattgtgactgagactta

SEQ ID NO: 2850 - DNA, 19 bp, Homo sapiens
tattgtgactgagacttac

SEQ ID NO: 2851 - DNA, 19 bp, Homo sapiens
attgtgactgagacttacg

SEQ ID NO: 2852 - DNA, 19 bp, Homo sapiens
ttgtgactgagacttacgg

SEQ ID NO: 2853 - DNA, 19 bp, Homo sapiens
tgtgactgagacttacggt

SEQ ID NO: 2854 - DNA, 19 bp, Homo sapiens
gtgactgagacttacggta

SEQ ID NO: 2855 - DNA, 19 bp, Homo sapiens
tgactgagacttacggtaa

SEQ ID NO: 2856 - DNA, 19 bp, Homo sapiens
gactgagacttacggtaat

SEQ ID NO: 2857 - DNA, 19 bp, Homo sapiens
actgagacttacggtaatg

SEQ ID NO: 2858 - DNA, 19 bp, Homo sapiens
ctgagacttacggtaatgc

SEQ ID NO: 2859 - DNA, 19 bp, Homo sapiens
tgagacttacggtaatgct

SEQ ID NO: 2860 - DNA, 19 bp, Homo sapiens
gagacttacggtaatgctg

SEQ ID NO: 2861 - DNA, 19 bp, Homo sapiens
agacttacggtaatgctga

SEQ ID NO: 2862 - DNA, 19 bp, Homo sapiens
gacttacggtaatgctgat

SEQ ID NO: 2863 - DNA, 19 bp, Homo sapiens
acttacggtaatgctgatc

SEQ ID NO: 2864 - DNA, 19 bp, Homo sapiens
cttacggtaatgctgatcc

SEQ ID NO: 2865 - DNA, 19 bp, Homo sapiens
ttacggtaatgctgatcca

SEQ ID NO: 2866 - DNA, 19 bp, Homo sapiens
tacggtaatgctgatccat

SEQ ID NO: 2867 - DNA, 19 bp, Homo sapiens
acggtaatgctgatccatg

SEQ ID NO: 2868 - DNA, 19 bp, Homo sapiens
cggtaatgctgatccatgt

SEQ ID NO: 2869 - DNA, 19 bp, Homo sapiens
ggtaatgctgatccatgtg

SEQ ID NO: 2870 - DNA, 19 bp, Homo sapiens
gtaatgctgatccatgtgt

SEQ ID NO: 2871 - DNA, 19 bp, Homo sapiens
taatgctgatccatgtgtg

SEQ ID NO: 2872 - DNA, 19 bp, Homo sapiens
aatgctgatccatgtgtgc

SEQ ID NO: 2873 - DNA, 19 bp, Homo sapiens
atgctgatccatgtgtgca

SEQ ID NO: 2874 - DNA, 19 bp, Homo sapiens
tgctgatccatgtgtgcaa

SEQ ID NO: 2875 - DNA, 19 bp, Homo sapiens
gctgatccatgtgtgcaac

SEQ ID NO: 2876 - DNA, 19 bp, Homo sapiens
ctgatccatgtgtgcaacc

SEQ ID NO: 2877 - DNA, 19 bp, Homo sapiens
tgatccatgtgtgcaaccc

SEQ ID NO: 2878 - DNA, 19 bp, Homo sapiens
gatccatgtgtgcaaccca

SEQ ID NO: 2879 - DNA, 19 bp, Homo sapiens
atccatgtgtgcaacccac

SEQ ID NO: 2880 - DNA, 19 bp, Homo sapiens
tccatgtgtgcaacccact

SEQ ID NO: 2881 - DNA, 19 bp, Homo sapiens
ccatgtgtgcaacccacta

SEQ ID NO: 2882 - DNA, 19 bp, Homo sapiens
catgtgtgcaacccactac

SEQ ID NO: 2883 - DNA, 19 bp, Homo sapiens
atgtgtgcaacccactaca

SEQ ID NO: 2884 - DNA, 19 bp, Homo sapiens
tgtgtgcaacccactacaa

SEQ ID NO: 2885 - DNA, 19 bp, Homo sapiens
gtgtgcaacccactacaat

SEQ ID NO: 2886 - DNA, 19 bp, Homo sapiens
tgtgcaacccactacaatt

SEQ ID NO: 2887 - DNA, 19 bp, Homo sapiens
gtgcaacccactacaatta

SEQ ID NO: 2888 - DNA, 19 bp, Homo sapiens
tgcaacccactacaattat

SEQ ID NO: 2889 - DNA, 19 bp, Homo sapiens
gcaacccactacaattatt

SEQ ID NO: 2890 - DNA, 19 bp, Homo sapiens
caacccactacaattattt

SEQ ID NO: 2891 - DNA, 19 bp, Homo sapiens
aacccactacaattatttt

SEQ ID NO: 2892 - DNA, 19 bp, Homo sapiens
acccactacaattattttt

SEQ ID NO: 2893 - DNA, 19 bp, Homo sapiens
cccactacaattatttttg

SEQ ID NO: 2894 - DNA, 19 bp, Homo sapiens
ccactacaattatttttga

SEQ ID NO: 2895 - DNA, 19 bp, Homo sapiens
cactacaattatttttgat

SEQ ID NO: 2896 - DNA, 19 bp, Homo sapiens
actacaattatttttgatc

SEQ ID NO: 2897 - DNA, 19 bp, Homo sapiens
ctacaattatttttgatcc

SEQ ID NO: 2898 - DNA, 19 bp, Homo sapiens
tacaattatttttgatcct

SEQ ID NO: 2899 - DNA, 19 bp, Homo sapiens
acaattatttttgatcctc

SEQ ID NO: 2900 - DNA, 19 bp, Homo sapiens
caattatttttgatcctca

SEQ ID NO: 2901 - DNA, 19 bp, Homo sapiens
aattatttttgatcctcag

SEQ ID NO: 2902 - DNA, 19 bp, Homo sapiens
attatttttgatcctcagc

SEQ ID NO: 2903 - DNA, 19 bp, Homo sapiens
ttatttttgatcctcagct

SEQ ID NO: 2904 - DNA, 19 bp, Homo sapiens
tatttttgatcctcagctt

SEQ ID NO: 2905 - DNA, 19 bp, Homo sapiens
atttttgatcctcagcttg

SEQ ID NO: 2906 - DNA, 19 bp, Homo sapiens
tttttgatcctcagcttgc

SEQ ID NO: 2907 - DNA, 19 bp, Homo sapiens
ttttgatcctcagcttgca

SEQ ID NO: 2908 - DNA, 19 bp, Homo sapiens
tttgatcctcagcttgcac

SEQ ID NO: 2909 - DNA, 19 bp, Homo sapiens
ttgatcctcagcttgcacc

SEQ ID NO: 2910 - DNA, 19 bp, Homo sapiens
tgatcctcagcttgcaccc

SEQ ID NO: 2911 - DNA, 19 bp, Homo sapiens
gatcctcagcttgcaccca

SEQ ID NO: 2912 - DNA, 19 bp, Homo sapiens
atcctcagcttgcacccaa

SEQ ID NO: 2913 - DNA, 19 bp, Homo sapiens
tcctcagcttgcacccaat

SEQ ID NO: 2914 - DNA, 19 bp, Homo sapiens
cctcagcttgcacccaatg

SEQ ID NO: 2915 - DNA, 19 bp, Homo sapiens
ctcagcttgcacccaatgt

SEQ ID NO: 2916 - DNA, 19 bp, Homo sapiens
tcagcttgcacccaatgtt

SEQ ID NO: 2917 - DNA, 19 bp, Homo sapiens
cagcttgcacccaatgttg

SEQ ID NO: 2918 - DNA, 19 bp, Homo sapiens
agcttgcacccaatgttgt

SEQ ID NO: 2919 - DNA, 19 bp, Homo sapiens
gcttgcacccaatgttgta

SEQ ID NO: 2920 - DNA, 19 bp, Homo sapiens
cttgcacccaatgttgtag

SEQ ID NO: 2921 - DNA, 19 bp, Homo sapiens
ttgcacccaatgttgtagt

SEQ ID NO: 2922 - DNA, 19 bp, Homo sapiens
tgcacccaatgttgtagta

SEQ ID NO: 2923 - DNA, 19 bp, Homo sapiens
gcacccaatgttgtagtaa

SEQ ID NO: 2924 - DNA, 19 bp, Homo sapiens
cacccaatgttgtagtaac

SEQ ID NO: 2925 - DNA, 19 bp, Homo sapiens
acccaatgttgtagtaacc

SEQ ID NO: 2926 - DNA, 19 bp, Homo sapiens
cccaatgttgtagtaaccg

SEQ ID NO: 2927 - DNA, 19 bp, Homo sapiens
ccaatgttgtagtaaccga

SEQ ID NO: 2928 - DNA, 19 bp, Homo sapiens
caatgttgtagtaaccgaa

SEQ ID NO: 2929 - DNA, 19 bp, Homo sapiens
aatgttgtagtaaccgaag

SEQ ID NO: 2930 - DNA, 19 bp, Homo sapiens
atgttgtagtaaccgaagc

SEQ ID NO: 2931 - DNA, 19 bp, Homo sapiens
tgttgtagtaaccgaagca

SEQ ID NO: 2932 - DNA, 19 bp, Homo sapiens
gttgtagtaaccgaagcag

SEQ ID NO: 2933 - DNA, 19 bp, Homo sapiens
ttgtagtaaccgaagcagt

SEQ ID NO: 2934 - DNA, 19 bp, Homo sapiens
tgtagtaaccgaagcagta

SEQ ID NO: 2935 - DNA, 19 bp, Homo sapiens
gtagtaaccgaagcagtaa

SEQ ID NO: 2936 - DNA, 19 bp, Homo sapiens
tagtaaccgaagcagtaat

SEQ ID NO: 2937 - DNA, 19 bp, Homo sapiens
agtaaccgaagcagtaatg

SEQ ID NO: 2938 - DNA, 19 bp, Homo sapiens
gtaaccgaagcagtaatgg

SEQ ID NO: 2939 - DNA, 19 bp, Homo sapiens
taaccgaagcagtaatggc

SEQ ID NO: 2940 - DNA, 19 bp, Homo sapiens
aaccgaagcagtaatggca

SEQ ID NO: 2941 - DNA, 19 bp, Homo sapiens
accgaagcagtaatggcac

SEQ ID NO: 2942 - DNA, 19 bp, Homo sapiens
ccgaagcagtaatggcacc

SEQ ID NO: 2943 - DNA, 19 bp, Homo sapiens
cgaagcagtaatggcacct

SEQ ID NO: 2944 - DNA, 19 bp, Homo sapiens
gaagcagtaatggcacctg

SEQ ID NO: 2945 - DNA, 19 bp, Homo sapiens
aagcagtaatggcacctgt

SEQ ID NO: 2946 - DNA, 19 bp, Homo sapiens
agcagtaatggcacctgtc

SEQ ID NO: 2947 - DNA, 19 bp, Homo sapiens
gcagtaatggcacctgtct

SEQ ID NO: 2948 - DNA, 19 bp, Homo sapiens
cagtaatggcacctgtcta

SEQ ID NO: 2949 - DNA, 19 bp, Homo sapiens
agtaatggcacctgtctat

SEQ ID NO: 2950 - DNA, 19 bp, Homo sapiens
gtaatggcacctgtctatg

SEQ ID NO: 2951 - DNA, 19 bp, Homo sapiens
taatggcacctgtctatga

SEQ ID NO: 2952 - DNA, 19 bp, Homo sapiens
aatggcacctgtctatgat

SEQ ID NO: 2953 - DNA, 19 bp, Homo sapiens
atggcacctgtctatgata

SEQ ID NO: 2954 - DNA, 19 bp, Homo sapiens
tggcacctgtctatgatat

SEQ ID NO: 2955 - DNA, 19 bp, Homo sapiens
ggcacctgtctatgatatt

SEQ ID NO: 2956 - DNA, 19 bp, Homo sapiens
gcacctgtctatgatattc

SEQ ID NO: 2957 - DNA, 19 bp, Homo sapiens
cacctgtctatgatattca

SEQ ID NO: 2958 - DNA, 19 bp, Homo sapiens
acctgtctatgatattcaa

SEQ ID NO: 2959 - DNA, 19 bp, Homo sapiens
cctgtctatgatattcaag

SEQ ID NO: 2960 - DNA, 19 bp, Homo sapiens
ctgtctatgatattcaagg

SEQ ID NO: 2961 - DNA, 19 bp, Homo sapiens
tgtctatgatattcaaggg

SEQ ID NO: 2962 - DNA, 19 bp, Homo sapiens
gtctatgatattcaaggga

SEQ ID NO: 2963 - DNA, 19 bp, Homo sapiens
tctatgatattcaagggaa

SEQ ID NO: 2964 - DNA, 19 bp, Homo sapiens
ctatgatattcaagggaat

SEQ ID NO: 2965 - DNA, 19 bp, Homo sapiens
tatgatattcaagggaata

SEQ ID NO: 2966 - DNA, 19 bp, Homo sapiens
atgatattcaagggaatat

SEQ ID NO: 2967 - DNA, 19 bp, Homo sapiens
tgatattcaagggaatatt

SEQ ID NO: 2968 - DNA, 19 bp, Homo sapiens
gatattcaagggaatattt

SEQ ID NO: 2969 - DNA, 19 bp, Homo sapiens
atattcaagggaatatttg

SEQ ID NO: 2970 - DNA, 19 bp, Homo sapiens
tattcaagggaatatttgt

SEQ ID NO: 2971 - DNA, 19 bp, Homo sapiens
attcaagggaatatttgtg

SEQ ID NO: 2972 - DNA, 19 bp, Homo sapiens
ttcaagggaatatttgtgt

SEQ ID NO: 2973 - DNA, 19 bp, Homo sapiens
tcaagggaatatttgtgta

SEQ ID NO: 2974 - DNA, 19 bp, Homo sapiens
caagggaatatttgtgtac

SEQ ID NO: 2975 - DNA, 19 bp, Homo sapiens
aagggaatatttgtgtacc

SEQ ID NO: 2976 - DNA, 19 bp, Homo sapiens
agggaatatttgtgtacct

SEQ ID NO: 2977 - DNA, 19 bp, Homo sapiens
gggaatatttgtgtacctg

SEQ ID NO: 2978 - DNA, 19 bp, Homo sapiens
ggaatatttgtgtacctgc

SEQ ID NO: 2979 - DNA, 19 bp, Homo sapiens
gaatatttgtgtacctgct

SEQ ID NO: 2980 - DNA, 19 bp, Homo sapiens
aatatttgtgtacctgctg

SEQ ID NO: 2981 - DNA, 19 bp, Homo sapiens
atatttgtgtacctgctga

SEQ ID NO: 2982 - DNA, 19 bp, Homo sapiens
tatttgtgtacctgctgag

SEQ ID NO: 2983 - DNA, 19 bp, Homo sapiens
atttgtgtacctgctgagt

SEQ ID NO: 2984 - DNA, 19 bp, Homo sapiens
tttgtgtacctgctgagtt

SEQ ID NO: 2985 - DNA, 19 bp, Homo sapiens
ttgtgtacctgctgagtta

SEQ ID NO: 2986 - DNA, 19 bp, Homo sapiens
tgtgtacctgctgagttag

SEQ ID NO: 2987 - DNA, 19 bp, Homo sapiens
gtgtacctgctgagttagc

SEQ ID NO: 2988 - DNA, 19 bp, Homo sapiens
tgtacctgctgagttagca

SEQ ID NO: 2989 - DNA, 19 bp, Homo sapiens
gtacctgctgagttagcag

SEQ ID NO: 2990 - DNA, 19 bp, Homo sapiens
tacctgctgagttagcaga

SEQ ID NO: 2991 - DNA, 19 bp, Homo sapiens
acctgctgagttagcagat

SEQ ID NO: 2992 - DNA, 19 bp, Homo sapiens
cctgctgagttagcagatt

SEQ ID NO: 2993 - DNA, 19 bp, Homo sapiens
ctgctgagttagcagatta

SEQ ID NO: 2994 - DNA, 19 bp, Homo sapiens
tgctgagttagcagattac

SEQ ID NO: 2995 - DNA, 19 bp, Homo sapiens
gctgagttagcagattaca

SEQ ID NO: 2996 - DNA, 19 bp, Homo sapiens
ctgagttagcagattacaa

SEQ ID NO: 2997 - DNA, 19 bp, Homo sapiens
tgagttagcagattacaac

SEQ ID NO: 2998 - DNA, 19 bp, Homo sapiens
gagttagcagattacaaca

SEQ ID NO: 2999 - DNA, 19 bp, Homo sapiens
agttagcagattacaacaa

SEQ ID NO: 3000 - DNA, 19 bp, Homo sapiens
gttagcagattacaacaat

SEQ ID NO: 3001 - DNA, 19 bp, Homo sapiens
ttagcagattacaacaatg

SEQ ID NO: 3002 - DNA, 19 bp, Homo sapiens
tagcagattacaacaatgt

SEQ ID NO: 3003 - DNA, 19 bp, Homo sapiens
agcagattacaacaatgta

SEQ ID NO: 3004 - DNA, 19 bp, Homo sapiens
gcagattacaacaatgtaa

SEQ ID NO: 3005 - DNA, 19 bp, Homo sapiens
cagattacaacaatgtaat

SEQ ID NO: 3006 - DNA, 19 bp, Homo sapiens
agattacaacaatgtaatc

SEQ ID NO: 3007 - DNA, 19 bp, Homo sapiens
gattacaacaatgtaatct

SEQ ID NO: 3008 - DNA, 19 bp, Homo sapiens
attacaacaatgtaatcta

SEQ ID NO: 3009 - DNA, 19 bp, Homo sapiens
ttacaacaatgtaatctat

SEQ ID NO: 3010 - DNA, 19 bp, Homo sapiens
tacaacaatgtaatctatg

SEQ ID NO: 3011 - DNA, 19 bp, Homo sapiens
acaacaatgtaatctatgc

SEQ ID NO: 3012 - DNA, 19 bp, Homo sapiens
caacaatgtaatctatgct

SEQ ID NO: 3013 - DNA, 19 bp, Homo sapiens
aacaatgtaatctatgctg

SEQ ID NO: 3014 - DNA, 19 bp, Homo sapiens
acaatgtaatctatgctga

SEQ ID NO: 3015 - DNA, 19 bp, Homo sapiens
caatgtaatctatgctgag

SEQ ID NO: 3016 - DNA, 19 bp, Homo sapiens
aatgtaatctatgctgaga

SEQ ID NO: 3017 - DNA, 19 bp, Homo sapiens
atgtaatctatgctgagag

SEQ ID NO: 3018 - DNA, 19 bp, Homo sapiens
tgtaatctatgctgagaga

SEQ ID NO: 3019 - DNA, 19 bp, Homo sapiens
gtaatctatgctgagagag

SEQ ID NO: 3020 - DNA, 19 bp, Homo sapiens
taatctatgctgagagagt

SEQ ID NO: 3021 - DNA, 19 bp, Homo sapiens
aatctatgctgagagagta

SEQ ID NO: 3022 - DNA, 19 bp, Homo sapiens
atctatgctgagagagtac

SEQ ID NO: 3023 - DNA, 19 bp, Homo sapiens
tctatgctgagagagtact

SEQ ID NO: 3024 - DNA, 19 bp, Homo sapiens
ctatgctgagagagtactg

SEQ ID NO: 3025 - DNA, 19 bp, Homo sapiens
tatgctgagagagtactgg

SEQ ID NO: 3026 - DNA, 19 bp, Homo sapiens
atgctgagagagtactggc

SEQ ID NO: 3027 - DNA, 19 bp, Homo sapiens
tgctgagagagtactggct

SEQ ID NO: 3028 - DNA, 19 bp, Homo sapiens
gctgagagagtactggcta

SEQ ID NO: 3029 - DNA, 19 bp, Homo sapiens
ctgagagagtactggctag

SEQ ID NO: 3030 - DNA, 19 bp, Homo sapiens
tgagagagtactggctagt

SEQ ID NO: 3031 - DNA, 19 bp, Homo sapiens
gagagagtactggctagtc

SEQ ID NO: 3032 - DNA, 19 bp, Homo sapiens
agagagtactggctagtcc

SEQ ID NO: 3033 - DNA, 19 bp, Homo sapiens
gagagtactggctagtcct

SEQ ID NO: 3034 - DNA, 19 bp, Homo sapiens
agagtactggctagtcctg

SEQ ID NO: 3035 - DNA, 19 bp, Homo sapiens
gagtactggctagtcctgg

SEQ ID NO: 3036 - DNA, 19 bp, Homo sapiens
agtactggctagtcctggt

SEQ ID NO: 3037 - DNA, 19 bp, Homo sapiens
gtactggctagtcctggtg

SEQ ID NO: 3038 - DNA, 19 bp, Homo sapiens
tactggctagtcctggtgt

SEQ ID NO: 3039 - DNA, 19 bp, Homo sapiens
actggctagtcctggtgtg

SEQ ID NO: 3040 - DNA, 19 bp, Homo sapiens
ctggctagtcctggtgtgc

SEQ ID NO: 3041 - DNA, 19 bp, Homo sapiens
tggctagtcctggtgtgcc

SEQ ID NO: 3042 - DNA, 19 bp, Homo sapiens
ggctagtcctggtgtgcct

SEQ ID NO: 3043 - DNA, 19 bp, Homo sapiens
gctagtcctggtgtgcctg

SEQ ID NO: 3044 - DNA, 19 bp, Homo sapiens
ctagtcctggtgtgcctga

SEQ ID NO: 3045 - DNA, 19 bp, Homo sapiens
tagtcctggtgtgcctgac

SEQ ID NO: 3046 - DNA, 19 bp, Homo sapiens
agtcctggtgtgcctgaca

SEQ ID NO: 3047 - DNA, 19 bp, Homo sapiens
gtcctggtgtgcctgacat

SEQ ID NO: 3048 - DNA, 19 bp, Homo sapiens
tcctggtgtgcctgacatg

SEQ ID NO: 3049 - DNA, 19 bp, Homo sapiens
cctggtgtgcctgacatga

SEQ ID NO: 3050 - DNA, 19 bp, Homo sapiens
ctggtgtgcctgacatgag

SEQ ID NO: 3051 - DNA, 19 bp, Homo sapiens
tggtgtgcctgacatgagc

SEQ ID NO: 3052 - DNA, 19 bp, Homo sapiens
ggtgtgcctgacatgagca

SEQ ID NO: 3053 - DNA, 19 bp, Homo sapiens
gtgtgcctgacatgagcaa

SEQ ID NO: 3054 - DNA, 19 bp, Homo sapiens
tgtgcctgacatgagcaat

SEQ ID NO: 3055 - DNA, 19 bp, Homo sapiens
gtgcctgacatgagcaata

SEQ ID NO: 3056 - DNA, 19 bp, Homo sapiens
tgcctgacatgagcaatag

SEQ ID NO: 3057 - DNA, 19 bp, Homo sapiens
gcctgacatgagcaatagt

SEQ ID NO: 3058 - DNA, 19 bp, Homo sapiens
cctgacatgagcaatagta

SEQ ID NO: 3059 - DNA, 19 bp, Homo sapiens
ctgacatgagcaatagtag

SEQ ID NO: 3060 - DNA, 19 bp, Homo sapiens
tgacatgagcaatagtagc

SEQ ID NO: 3061 - DNA, 19 bp, Homo sapiens
gacatgagcaatagtagca

SEQ ID NO: 3062 - DNA, 19 bp, Homo sapiens
acatgagcaatagtagcac

SEQ ID NO: 3063 - DNA, 19 bp, Homo sapiens
catgagcaatagtagcacg

SEQ ID NO: 3064 - DNA, 19 bp, Homo sapiens
atgagcaatagtagcacga

SEQ ID NO: 3065 - DNA, 19 bp, Homo sapiens
tgagcaatagtagcacgac

SEQ ID NO: 3066 - DNA, 19 bp, Homo sapiens
gagcaatagtagcacgact

SEQ ID NO: 3067 - DNA, 19 bp, Homo sapiens
agcaatagtagcacgactg

SEQ ID NO: 3068 - DNA, 19 bp, Homo sapiens
gcaatagtagcacgactga

SEQ ID NO: 3069 - DNA, 19 bp, Homo sapiens
caatagtagcacgactgag

SEQ ID NO: 3070 - DNA, 19 bp, Homo sapiens
aatagtagcacgactgagg

SEQ ID NO: 3071 - DNA, 19 bp, Homo sapiens
atagtagcacgactgaggg

SEQ ID NO: 3072 - DNA, 19 bp, Homo sapiens
tagtagcacgactgagggt

SEQ ID NO: 3073 - DNA, 19 bp, Homo sapiens
agtagcacgactgagggtt

SEQ ID NO: 3074 - DNA, 19 bp, Homo sapiens
gtagcacgactgagggttg

SEQ ID NO: 3075 - DNA, 19 bp, Homo sapiens
tagcacgactgagggttgt

SEQ ID NO: 3076 - DNA, 19 bp, Homo sapiens
agcacgactgagggttgta

SEQ ID NO: 3077 - DNA, 19 bp, Homo sapiens
gcacgactgagggttgtat

SEQ ID NO: 3078 - DNA, 19 bp, Homo sapiens
cacgactgagggttgtatg

SEQ ID NO: 3079 - DNA, 19 bp, Homo sapiens
acgactgagggttgtatgg

SEQ ID NO: 3080 - DNA, 19 bp, Homo sapiens
cgactgagggttgtatggg

SEQ ID NO: 3081 - DNA, 19 bp, Homo sapiens
gactgagggttgtatggga

SEQ ID NO: 3082 - DNA, 19 bp, Homo sapiens
actgagggttgtatgggac

SEQ ID NO: 3083 - DNA, 19 bp, Homo sapiens
ctgagggttgtatgggacc

SEQ ID NO: 3084 - DNA, 19 bp, Homo sapiens
tgagggttgtatgggacct

SEQ ID NO: 3085 - DNA, 19 bp, Homo sapiens
gagggttgtatgggacctg

SEQ ID NO: 3086 - DNA, 19 bp, Homo sapiens
agggttgtatgggacctgt

SEQ ID NO: 3087 - DNA, 19 bp, Homo sapiens
gggttgtatgggacctgtg

SEQ ID NO: 3088 - DNA, 19 bp, Homo sapiens
ggttgtatgggacctgtga

SEQ ID NO: 3089 - DNA, 19 bp, Homo sapiens
gttgtatgggacctgtgat

SEQ ID NO: 3090 - DNA, 19 bp, Homo sapiens
ttgtatgggacctgtgatg

SEQ ID NO: 3091 - DNA, 19 bp, Homo sapiens
tgtatgggacctgtgatga

SEQ ID NO: 3092 - DNA, 19 bp, Homo sapiens
gtatgggacctgtgatgag

SEQ ID NO: 3093 - DNA, 19 bp, Homo sapiens
tatgggacctgtgatgagc

SEQ ID NO: 3094 - DNA, 19 bp, Homo sapiens
atgggacctgtgatgagcg

SEQ ID NO: 3095 - DNA, 19 bp, Homo sapiens
tgggacctgtgatgagcgg

SEQ ID NO: 3096 - DNA, 19 bp, Homo sapiens
gggacctgtgatgagcggc

SEQ ID NO: 3097 - DNA, 19 bp, Homo sapiens
ggacctgtgatgagcggca

SEQ ID NO: 3098 - DNA, 19 bp, Homo sapiens
gacctgtgatgagcggcaa

SEQ ID NO: 3099 - DNA, 19 bp, Homo sapiens
acctgtgatgagcggcaat

SEQ ID NO: 3100 - DNA, 19 bp, Homo sapiens
cctgtgatgagcggcaata

SEQ ID NO: 3101 - DNA, 19 bp, Homo sapiens
ctgtgatgagcggcaatat

SEQ ID NO: 3102 - DNA, 19 bp, Homo sapiens
tgtgatgagcggcaatatt

SEQ ID NO: 3103 - DNA, 19 bp, Homo sapiens
gtgatgagcggcaatattt

SEQ ID NO: 3104 - DNA, 19 bp, Homo sapiens
tgatgagcggcaatatttt

SEQ ID NO: 3105 - DNA, 19 bp, Homo sapiens
gatgagcggcaatatttta

SEQ ID NO: 3106 - DNA, 19 bp, Homo sapiens
atgagcggcaatattttag

SEQ ID NO: 3107 - DNA, 19 bp, Homo sapiens
tgagcggcaatattttagt

SEQ ID NO: 3108 - DNA, 19 bp, Homo sapiens
gagcggcaatattttagta

SEQ ID NO: 3109 - DNA, 19 bp, Homo sapiens
agcggcaatattttagtag

SEQ ID NO: 3110 - DNA, 19 bp, Homo sapiens
gcggcaatattttagtagg

SEQ ID NO: 3111 - DNA, 19 bp, Homo sapiens
cggcaatattttagtaggg

SEQ ID NO: 3112 - DNA, 19 bp, Homo sapiens
ggcaatattttagtagggc

SEQ ID NO: 3113 - DNA, 19 bp, Homo sapiens
gcaatattttagtagggcc

SEQ ID NO: 3114 - DNA, 19 bp, Homo sapiens
caatattttagtagggcca

SEQ ID NO: 3115 - DNA, 19 bp, Homo sapiens
aatattttagtagggccag

SEQ ID NO: 3116 - DNA, 19 bp, Homo sapiens
atattttagtagggccaga

SEQ ID NO: 3117 - DNA, 19 bp, Homo sapiens
tattttagtagggccagaa

SEQ ID NO: 3118 - DNA, 19 bp, Homo sapiens
attttagtagggccagaaa

SEQ ID NO: 3119 - DNA, 19 bp, Homo sapiens
ttttagtagggccagaaat

SEQ ID NO: 3120 - DNA, 19 bp, Homo sapiens
tttagtagggccagaaatt

SEQ ID NO: 3121 - DNA, 19 bp, Homo sapiens
ttagtagggccagaaattc

SEQ ID NO: 3122 - DNA, 19 bp, Homo sapiens
tagtagggccagaaattca

SEQ ID NO: 3123 - DNA, 19 bp, Homo sapiens
agtagggccagaaattcaa

SEQ ID NO: 3124 - DNA, 19 bp, Homo sapiens
gtagggccagaaattcaag

SEQ ID NO: 3125 - DNA, 19 bp, Homo sapiens
tagggccagaaattcaagt

SEQ ID NO: 3126 - DNA, 19 bp, Homo sapiens
agggccagaaattcaagtg

SEQ ID NO: 3127 - DNA, 19 bp, Homo sapiens
gggccagaaattcaagtga

SEQ ID NO: 3128 - DNA, 19 bp, Homo sapiens
ggccagaaattcaagtgat

SEQ ID NO: 3129 - DNA, 19 bp, Homo sapiens
gccagaaattcaagtgatg

SEQ ID NO: 3130 - DNA, 19 bp, Homo sapiens
ccagaaattcaagtgatgc

SEQ ID NO: 3131 - DNA, 19 bp, Homo sapiens
cagaaattcaagtgatgca

SEQ ID NO: 3132 - DNA, 19 bp, Homo sapiens
agaaattcaagtgatgcaa

SEQ ID NO: 3133 - DNA, 19 bp, Homo sapiens
gaaattcaagtgatgcaaa

SEQ ID NO: 3134 - DNA, 19 bp, Homo sapiens
aaattcaagtgatgcaaat

SEQ ID NO: 3135 - DNA, 19 bp, Homo sapiens
aattcaagtgatgcaaatg

SEQ ID NO: 3136 - DNA, 19 bp, Homo sapiens
attcaagtgatgcaaatga

SEQ ID NO: 3137 - DNA, 19 bp, Homo sapiens
ttcaagtgatgcaaatgat

SEQ ID NO: 3138 - DNA, 19 bp, Homo sapiens
tcaagtgatgcaaatgatg

SEQ ID NO: 3139 - DNA, 19 bp, Homo sapiens
caagtgatgcaaatgatga

SEQ ID NO: 3140 - DNA, 19 bp, Homo sapiens
aagtgatgcaaatgatgag

SEQ ID NO: 3141 - DNA, 19 bp, Homo sapiens
agtgatgcaaatgatgagt

SEQ ID NO: 3142 - DNA, 19 bp, Homo sapiens
gtgatgcaaatgatgagtc

SEQ ID NO: 3143 - DNA, 19 bp, Homo sapiens
tgatgcaaatgatgagtcc

SEQ ID NO: 3144 - DNA, 19 bp, Homo sapiens
gatgcaaatgatgagtcca

SEQ ID NO: 3145 - DNA, 19 bp, Homo sapiens
atgcaaatgatgagtccag

SEQ ID NO: 3146 - DNA, 19 bp, Homo sapiens
tgcaaatgatgagtccaga

SEQ ID NO: 3147 - DNA, 19 bp, Homo sapiens
gcaaatgatgagtccagac

SEQ ID NO: 3148 - DNA, 19 bp, Homo sapiens
caaatgatgagtccagacc

SEQ ID NO: 3149 - DNA, 19 bp, Homo sapiens
aaatgatgagtccagacct

SEQ ID NO: 3150 - DNA, 19 bp, Homo sapiens
aatgatgagtccagacctt

SEQ ID NO: 3151 - DNA, 19 bp, Homo sapiens
atgatgagtccagaccttc

SEQ ID NO: 3152 - DNA, 19 bp, Homo sapiens
tgatgagtccagaccttcc

SEQ ID NO: 3153 - DNA, 19 bp, Homo sapiens
gatgagtccagaccttccc

SEQ ID NO: 3154 - DNA, 19 bp, Homo sapiens
atgagtccagaccttccca

SEQ ID NO: 3155 - DNA, 19 bp, Homo sapiens
tgagtccagaccttcccat

SEQ ID NO: 3156 - DNA, 19 bp, Homo sapiens
gagtccagaccttcccata

SEQ ID NO: 3157 - DNA, 19 bp, Homo sapiens
agtccagaccttcccatag

SEQ ID NO: 3158 - DNA, 19 bp, Homo sapiens
gtccagaccttcccatagg

SEQ ID NO: 3159 - DNA, 19 bp, Homo sapiens
tccagaccttcccataggc

SEQ ID NO: 3160 - DNA, 19 bp, Homo sapiens
ccagaccttcccataggcc

SEQ ID NO: 3161 - DNA, 19 bp, Homo sapiens
cagaccttcccataggcca

SEQ ID NO: 3162 - DNA, 19 bp, Homo sapiens
agaccttcccataggccaa

SEQ ID NO: 3163 - DNA, 19 bp, Homo sapiens
gaccttcccataggccaaa

SEQ ID NO: 3164 - DNA, 19 bp, Homo sapiens
accttcccataggccaaac

SEQ ID NO: 3165 - DNA, 19 bp, Homo sapiens
ccttcccataggccaaacc

SEQ ID NO: 3166 - DNA, 19 bp, Homo sapiens
cttcccataggccaaaccg

SEQ ID NO: 3167 - DNA, 19 bp, Homo sapiens
ttcccataggccaaaccgt

SEQ ID NO: 3168 - DNA, 19 bp, Homo sapiens
tcccataggccaaaccgtt

SEQ ID NO: 3169 - DNA, 19 bp, Homo sapiens
cccataggccaaaccgttg

SEQ ID NO: 3170 - DNA, 19 bp, Homo sapiens
ccataggccaaaccgttgg

SEQ ID NO: 3171 - DNA, 19 bp, Homo sapiens
cataggccaaaccgttggc

SEQ ID NO: 3172 - DNA, 19 bp, Homo sapiens
ataggccaaaccgttggct

SEQ ID NO: 3173 - DNA, 19 bp, Homo sapiens
taggccaaaccgttggctc

SEQ ID NO: 3174 - DNA, 19 bp, Homo sapiens
aggccaaaccgttggctcc

SEQ ID NO: 3175 - DNA, 19 bp, Homo sapiens
ggccaaaccgttggctcca

SEQ ID NO: 3176 - DNA, 19 bp, Homo sapiens
gccaaaccgttggctccac

SEQ ID NO: 3177 - DNA, 19 bp, Homo sapiens
ccaaaccgttggctccaca

SEQ ID NO: 3178 - DNA, 19 bp, Homo sapiens
caaaccgttggctccacat

SEQ ID NO: 3179 - DNA, 19 bp, Homo sapiens
aaaccgttggctccacatc

SEQ ID NO: 3180 - DNA, 19 bp, Homo sapiens
aaccgttggctccacatcc

SEQ ID NO: 3181 - DNA, 19 bp, Homo sapiens
accgttggctccacatccc

SEQ ID NO: 3182 - DNA, 19 bp, Homo sapiens
ccgttggctccacatcccc

SEQ ID NO: 3183 - DNA, 19 bp, Homo sapiens
cgttggctccacatccccc

SEQ ID NO: 3184 - DNA, 19 bp, Homo sapiens
gttggctccacatccccca

SEQ ID NO: 3185 - DNA, 19 bp, Homo sapiens
ttggctccacatcccccat

SEQ ID NO: 3186 - DNA, 19 bp, Homo sapiens
tggctccacatcccccatg

SEQ ID NO: 3187 - DNA, 19 bp, Homo sapiens
ggctccacatcccccatga

SEQ ID NO: 3188 - DNA, 19 bp, Homo sapiens
gctccacatcccccatgac

SEQ ID NO: 3189 - DNA, 19 bp, Homo sapiens
ctccacatcccccatgaca

SEQ ID NO: 3190 - DNA, 19 bp, Homo sapiens
tccacatcccccatgacat

SEQ ID NO: 3191 - DNA, 19 bp, Homo sapiens
ccacatcccccatgacatc

SEQ ID NO: 3192 - DNA, 19 bp, Homo sapiens
cacatcccccatgacatct

SEQ ID NO: 3193 - DNA, 19 bp, Homo sapiens
acatcccccatgacatctc

SEQ ID NO: 3194 - DNA, 19 bp, Homo sapiens
catcccccatgacatctcg

SEQ ID NO: 3195 - DNA, 19 bp, Homo sapiens
atcccccatgacatctcga

SEQ ID NO: 3196 - DNA, 19 bp, Homo sapiens
tcccccatgacatctcgac

SEQ ID NO: 3197 - DNA, 19 bp, Homo sapiens
cccccatgacatctcgaca

SEQ ID NO: 3198 - DNA, 19 bp, Homo sapiens
ccccatgacatctcgacac

SEQ ID NO: 3199 - DNA, 19 bp, Homo sapiens
cccatgacatctcgacaca

SEQ ID NO: 3200 - DNA, 19 bp, Homo sapiens
ccatgacatctcgacacag

SEQ ID NO: 3201 - DNA, 19 bp, Homo sapiens
catgacatctcgacacaga

SEQ ID NO: 3202 - DNA, 19 bp, Homo sapiens
atgacatctcgacacagag

SEQ ID NO: 3203 - DNA, 19 bp, Homo sapiens
tgacatctcgacacagagt

SEQ ID NO: 3204 - DNA, 19 bp, Homo sapiens
gacatctcgacacagagta

SEQ ID NO: 3205 - DNA, 19 bp, Homo sapiens
acatctcgacacagagtaa

SEQ ID NO: 3206 - DNA, 19 bp, Homo sapiens
catctcgacacagagtaac

SEQ ID NO: 3207 - DNA, 19 bp, Homo sapiens
atctcgacacagagtaaca

SEQ ID NO: 3208 - DNA, 19 bp, Homo sapiens
tctcgacacagagtaacac

SEQ ID NO: 3209 - DNA, 19 bp, Homo sapiens
ctcgacacagagtaacacg

SEQ ID NO: 3210 - DNA, 19 bp, Homo sapiens
tcgacacagagtaacacga

SEQ ID NO: 3211 - DNA, 19 bp, Homo sapiens
cgacacagagtaacacgat

SEQ ID NO: 3212 - DNA, 19 bp, Homo sapiens
gacacagagtaacacgata

SEQ ID NO: 3213 - DNA, 19 bp, Homo sapiens
acacagagtaacacgatac

SEQ ID NO: 3214 - DNA, 19 bp, Homo sapiens
cacagagtaacacgataca

SEQ ID NO: 3215 - DNA, 19 bp, Homo sapiens
acagagtaacacgatacag

SEQ ID NO: 3216 - DNA, 19 bp, Homo sapiens
cagagtaacacgatacagt

SEQ ID NO: 3217 - DNA, 19 bp, Homo sapiens
agagtaacacgatacagta

SEQ ID NO: 3218 - DNA, 19 bp, Homo sapiens
gagtaacacgatacagtaa

SEQ ID NO: 3219 - DNA, 19 bp, Homo sapiens
agtaacacgatacagtaac

SEQ ID NO: 3220 - DNA, 19 bp, Homo sapiens
gtaacacgatacagtaaca

SEQ ID NO: 3221 - DNA, 19 bp, Homo sapiens
taacacgatacagtaacat

SEQ ID NO: 3222 - DNA, 19 bp, Homo sapiens
aacacgatacagtaacata

SEQ ID NO: 3223 - DNA, 19 bp, Homo sapiens
acacgatacagtaacatac

SEQ ID NO: 3224 - DNA, 19 bp, Homo sapiens
cacgatacagtaacataca

SEQ ID NO: 3225 - DNA, 19 bp, Homo sapiens
acgatacagtaacatacat

SEQ ID NO: 3226 - DNA, 19 bp, Homo sapiens
cgatacagtaacatacatt

SEQ ID NO: 3227 - DNA, 19 bp, Homo sapiens
gatacagtaacatacatta

SEQ ID NO: 3228 - DNA, 19 bp, Homo sapiens
atacagtaacatacattac

SEQ ID NO: 3229 - DNA, 19 bp, Homo sapiens
tacagtaacatacattaca

SEQ ID NO: 3230 - DNA, 19 bp, Homo sapiens
acagtaacatacattacac

SEQ ID NO: 3231 - DNA, 19 bp, Homo sapiens
cagtaacatacattacacc

SEQ ID NO: 3232 - DNA, 19 bp, Homo sapiens
agtaacatacattacaccc

SEQ ID NO: 3233 - DNA, 19 bp, Homo sapiens
gtaacatacattacaccca

SEQ ID NO: 3234 - DNA, 19 bp, Homo sapiens
taacatacattacacccaa

SEQ ID NO: 3235 - DNA, 19 bp, Homo sapiens
aacatacattacacccaac

SEQ ID NO: 3236 - DNA, 19 bp, Homo sapiens
acatacattacacccaaca

SEQ ID NO: 3237 - DNA, 19 bp, Homo sapiens
catacattacacccaacag

SEQ ID NO: 3238 - DNA, 19 bp, Homo sapiens
atacattacacccaacagt

SEQ ID NO: 3239 - DNA, 19 bp, Homo sapiens
tacattacacccaacagta

SEQ ID NO: 3240 - DNA, 19 bp, Homo sapiens
acattacacccaacagtaa

SEQ ID NO: 3241 - DNA, 19 bp, Homo sapiens
cattacacccaacagtaag

SEQ ID NO: 3242 - DNA, 19 bp, Homo sapiens
attacacccaacagtaagt

SEQ ID NO: 3243 - DNA, 19 bp, Homo sapiens
ttacacccaacagtaagtg

SEQ ID NO: 3244 - DNA, 19 bp, Homo sapiens
tacacccaacagtaagtgc

SEQ ID NO: 3245 - DNA, 19 bp, Homo sapiens
acacccaacagtaagtgct

SEQ ID NO: 3246 - DNA, 19 bp, Homo sapiens
cacccaacagtaagtgctt

SEQ ID NO: 3247 - DNA, 19 bp, Homo sapiens
acccaacagtaagtgcttt

SEQ ID NO: 3248 - DNA, 19 bp, Homo sapiens
cccaacagtaagtgcttta

SEQ ID NO: 3249 - DNA, 19 bp, Homo sapiens
ccaacagtaagtgctttat

SEQ ID NO: 3250 - DNA, 19 bp, Homo sapiens
caacagtaagtgctttatg

SEQ ID NO: 3251 - DNA, 19 bp, Homo sapiens
aacagtaagtgctttatgg

SEQ ID NO: 3252 - DNA, 19 bp, Homo sapiens
acagtaagtgctttatggt

SEQ ID NO: 3253 - DNA, 19 bp, Homo sapiens
cagtaagtgctttatggtc

SEQ ID NO: 3254 - DNA, 19 bp, Homo sapiens
agtaagtgctttatggtca

SEQ ID NO: 3255 - DNA, 19 bp, Homo sapiens
gtaagtgctttatggtcag

SEQ ID NO: 3256 - DNA, 19 bp, Homo sapiens
taagtgctttatggtcagt

SEQ ID NO: 3257 - DNA, 19 bp, Homo sapiens
aagtgctttatggtcagta

SEQ ID NO: 3258 - DNA, 19 bp, Homo sapiens
agtgctttatggtcagtat

SEQ ID NO: 3259 - DNA, 19 bp, Homo sapiens
gtgctttatggtcagtatt

SEQ ID NO: 3260 - DNA, 19 bp, Homo sapiens
tgctttatggtcagtattc

SEQ ID NO: 3261 - DNA, 19 bp, Homo sapiens
gctttatggtcagtattct

SEQ ID NO: 3262 - DNA, 19 bp, Homo sapiens
ctttatggtcagtattcta

SEQ ID NO: 3263 - DNA, 19 bp, Homo sapiens
tttatggtcagtattctat

SEQ ID NO: 3264 - DNA, 19 bp, Homo sapiens
ttatggtcagtattctatg

SEQ ID NO: 3265 - DNA, 19 bp, Homo sapiens
tatggtcagtattctatgt

SEQ ID NO: 3266 - DNA, 19 bp, Homo sapiens
atggtcagtattctatgtg

SEQ ID NO: 3267 - DNA, 19 bp, Homo sapiens
tggtcagtattctatgtgg

SEQ ID NO: 3268 - DNA, 19 bp, Homo sapiens
ggtcagtattctatgtgga

SEQ ID NO: 3269 - DNA, 19 bp, Homo sapiens
gtcagtattctatgtggag

SEQ ID NO: 3270 - DNA, 19 bp, Homo sapiens
tcagtattctatgtggaga

SEQ ID NO: 3271 - DNA, 19 bp, Homo sapiens
cagtattctatgtggagac

SEQ ID NO: 3272 - DNA, 19 bp, Homo sapiens
agtattctatgtggagacc

SEQ ID NO: 3273 - DNA, 19 bp, Homo sapiens
gtattctatgtggagacct

SEQ ID NO: 3274 - DNA, 19 bp, Homo sapiens
tattctatgtggagacctt

SEQ ID NO: 3275 - DNA, 19 bp, Homo sapiens
attctatgtggagaccttg

SEQ ID NO: 3276 - DNA, 19 bp, Homo sapiens
ttctatgtggagaccttgc

SEQ ID NO: 3277 - DNA, 19 bp, Homo sapiens
tctatgtggagaccttgca

SEQ ID NO: 3278 - DNA, 19 bp, Homo sapiens
ctatgtggagaccttgcac

SEQ ID NO: 3279 - DNA, 19 bp, Homo sapiens
tatgtggagaccttgcacc

SEQ ID NO: 3280 - DNA, 19 bp, Homo sapiens
atgtggagaccttgcacct

SEQ ID NO: 3281 - DNA, 19 bp, Homo sapiens
tgtggagaccttgcacctt

SEQ ID NO: 3282 - DNA, 19 bp, Homo sapiens
gtggagaccttgcaccttg

SEQ ID NO: 3283 - DNA, 19 bp, Homo sapiens
tggagaccttgcaccttgt

SEQ ID NO: 3284 - DNA, 19 bp, Homo sapiens
ggagaccttgcaccttgta

SEQ ID NO: 3285 - DNA, 19 bp, Homo sapiens
gagaccttgcaccttgtaa

SEQ ID NO: 3286 - DNA, 19 bp, Homo sapiens
agaccttgcaccttgtaat

SEQ ID NO: 3287 - DNA, 19 bp, Homo sapiens
gaccttgcaccttgtaatc

SEQ ID NO: 3288 - DNA, 19 bp, Homo sapiens
accttgcaccttgtaatca

SEQ ID NO: 3289 - DNA, 19 bp, Homo sapiens
ccttgcaccttgtaatcat

SEQ ID NO: 3290 - DNA, 19 bp, Homo sapiens
cttgcaccttgtaatcatc

SEQ ID NO: 3291 - DNA, 19 bp, Homo sapiens
ttgcaccttgtaatcatca

SEQ ID NO: 3292 - DNA, 19 bp, Homo sapiens
tgcaccttgtaatcatcaa

SEQ ID NO: 3293 - DNA, 19 bp, Homo sapiens
gcaccttgtaatcatcaat

SEQ ID NO: 3294 - DNA, 19 bp, Homo sapiens
caccttgtaatcatcaata

SEQ ID NO: 3295 - DNA, 19 bp, Homo sapiens
accttgtaatcatcaatac

SEQ ID NO: 3296 - DNA, 19 bp, Homo sapiens
ccttgtaatcatcaataca

SEQ ID NO: 3297 - DNA, 19 bp, Homo sapiens
cttgtaatcatcaatacat

SEQ ID NO: 3298 - DNA, 19 bp, Homo sapiens
ttgtaatcatcaatacatc

SEQ ID NO: 3299 - DNA, 19 bp, Homo sapiens
tgtaatcatcaatacatcc

SEQ ID NO: 3300 - DNA, 19 bp, Homo sapiens
gtaatcatcaatacatcca

SEQ ID NO: 3301 - DNA, 19 bp, Homo sapiens
taatcatcaatacatccac

SEQ ID NO: 3302 - DNA, 19 bp, Homo sapiens
aatcatcaatacatccacc

SEQ ID NO: 3303 - DNA, 19 bp, Homo sapiens
atcatcaatacatccacca

SEQ ID NO: 3304 - DNA, 19 bp, Homo sapiens
tcatcaatacatccaccaa

SEQ ID NO: 3305 - DNA, 19 bp, Homo sapiens
catcaatacatccaccaaa

SEQ ID NO: 3306 - DNA, 19 bp, Homo sapiens
atcaatacatccaccaaaa

SEQ ID NO: 3307 - DNA, 19 bp, Homo sapiens
tcaatacatccaccaaaaa

SEQ ID NO: 3308 - DNA, 19 bp, Homo sapiens
caatacatccaccaaaaat

SEQ ID NO: 3309 - DNA, 19 bp, Homo sapiens
aatacatccaccaaaaata

SEQ ID NO: 3310 - DNA, 19 bp, Homo sapiens
atacatccaccaaaaatat

SEQ ID NO: 3311 - DNA, 19 bp, Homo sapiens
tacatccaccaaaaatata

SEQ ID NO: 3312 - DNA, 19 bp, Homo sapiens
acatccaccaaaaatatat

SEQ ID NO: 3313 - DNA, 19 bp, Homo sapiens
catccaccaaaaatatata

SEQ ID NO: 3314 - DNA, 19 bp, Homo sapiens
atccaccaaaaatatataa

SEQ ID NO: 3315 - DNA, 19 bp, Homo sapiens
tccaccaaaaatatataat

SEQ ID NO: 3316 - DNA, 19 bp, Homo sapiens
ccaccaaaaatatataatg

SEQ ID NO: 3317 - DNA, 19 bp, Homo sapiens
caccaaaaatatataatgt

SEQ ID NO: 3318 - DNA, 19 bp, Homo sapiens
accaaaaatatataatgta

SEQ ID NO: 3319 - DNA, 19 bp, Homo sapiens
ccaaaaatatataatgtac

SEQ ID NO: 3320 - DNA, 19 bp, Homo sapiens
caaaaatatataatgtacc

SEQ ID NO: 3321 - DNA, 19 bp, Homo sapiens
aaaaatatataatgtacca

SEQ ID NO: 3322 - DNA, 19 bp, Homo sapiens
aaaatatataatgtaccat

SEQ ID NO: 3323 - DNA, 19 bp, Homo sapiens
aaatatataatgtaccata

SEQ ID NO: 3324 - DNA, 19 bp, Homo sapiens
aatatataatgtaccatat

SEQ ID NO: 3325 - DNA, 19 bp, Homo sapiens
atatataatgtaccatata

SEQ ID NO: 3326 - DNA, 19 bp, Homo sapiens
tatataatgtaccatatat

SEQ ID NO: 3327 - DNA, 19 bp, Homo sapiens
atataatgtaccatatata

SEQ ID NO: 3328 - DNA, 19 bp, Homo sapiens
tataatgtaccatatatat

SEQ ID NO: 3329 - DNA, 19 bp, Homo sapiens
ataatgtaccatatatatt

SEQ ID NO: 3330 - DNA, 19 bp, Homo sapiens
taatgtaccatatatatta

SEQ ID NO: 3331 - DNA, 19 bp, Homo sapiens
aatgtaccatatatattaa

SEQ ID NO: 3332 - DNA, 19 bp, Homo sapiens
atgtaccatatatattaat

SEQ ID NO: 3333 - DNA, 19 bp, Homo sapiens
tgtaccatatatattaata

SEQ ID NO: 3334 - DNA, 19 bp, Homo sapiens
gtaccatatatattaatag

SEQ ID NO: 3335 - DNA, 19 bp, Homo sapiens
taccatatatattaatagt

SEQ ID NO: 3336 - DNA, 19 bp, Homo sapiens
accatatatattaatagtc

SEQ ID NO: 3337 - DNA, 19 bp, Homo sapiens
ccatatatattaatagtca

SEQ ID NO: 3338 - DNA, 19 bp, Homo sapiens
catatatattaatagtcaa

SEQ ID NO: 3339 - DNA, 19 bp, Homo sapiens
atatatattaatagtcaac

SEQ ID NO: 3340 - DNA, 19 bp, Homo sapiens
tatatattaatagtcaaca

SEQ ID NO: 3341 - DNA, 19 bp, Homo sapiens
atatattaatagtcaacaa

SEQ ID NO: 3342 - DNA, 19 bp, Homo sapiens
tatattaatagtcaacaaa

SEQ ID NO: 3343 - DNA, 19 bp, Homo sapiens
atattaatagtcaacaaat

SEQ ID NO: 3344 - DNA, 19 bp, Homo sapiens
tattaatagtcaacaaata

SEQ ID NO: 3345 - DNA, 19 bp, Homo sapiens
attaatagtcaacaaatac

SEQ ID NO: 3346 - DNA, 19 bp, Homo sapiens
ttaatagtcaacaaatact

SEQ ID NO: 3347 - DNA, 19 bp, Homo sapiens
taatagtcaacaaatactc

SEQ ID NO: 3348 - DNA, 19 bp, Homo sapiens
aatagtcaacaaatactca

SEQ ID NO: 3349 - DNA, 19 bp, Homo sapiens
atagtcaacaaatactcag

SEQ ID NO: 3350 - DNA, 19 bp, Homo sapiens
tagtcaacaaatactcaga

SEQ ID NO: 3351 - DNA, 19 bp, Homo sapiens
agtcaacaaatactcagat

SEQ ID NO: 3352 - DNA, 19 bp, Homo sapiens
gtcaacaaatactcagata

SEQ ID NO: 3353 - DNA, 19 bp, Homo sapiens
tcaacaaatactcagatat

SEQ ID NO: 3354 - DNA, 19 bp, Homo sapiens
caacaaatactcagatatt

SEQ ID NO: 3355 - DNA, 19 bp, Homo sapiens
aacaaatactcagatattc

SEQ ID NO: 3356 - DNA, 19 bp, Homo sapiens
acaaatactcagatattct

SEQ ID NO: 3357 - DNA, 19 bp, Homo sapiens
caaatactcagatattcta

SEQ ID NO: 3358 - DNA, 19 bp, Homo sapiens
aaatactcagatattctaa

SEQ ID NO: 3359 - DNA, 19 bp, Homo sapiens
aatactcagatattctaag

SEQ ID NO: 3360 - DNA, 19 bp, Homo sapiens
atactcagatattctaagg

SEQ ID NO: 3361 - DNA, 19 bp, Homo sapiens
tactcagatattctaaggt

SEQ ID NO: 3362 - DNA, 19 bp, Homo sapiens
actcagatattctaaggtc

SEQ ID NO: 3363 - DNA, 19 bp, Homo sapiens
ctcagatattctaaggtca

SEQ ID NO: 3364 - DNA, 19 bp, Homo sapiens
tcagatattctaaggtcaa

SEQ ID NO: 3365 - DNA, 19 bp, Homo sapiens
cagatattctaaggtcaat

SEQ ID NO: 3366 - DNA, 19 bp, Homo sapiens
agatattctaaggtcaatg

SEQ ID NO: 3367 - DNA, 19 bp, Homo sapiens
gatattctaaggtcaatgc

SEQ ID NO: 3368 - DNA, 19 bp, Homo sapiens
atattctaaggtcaatgcc

SEQ ID NO: 3369 - DNA, 19 bp, Homo sapiens
tattctaaggtcaatgcca

SEQ ID NO: 3370 - DNA, 19 bp, Homo sapiens
attctaaggtcaatgccat

SEQ ID NO: 3371 - DNA, 19 bp, Homo sapiens
ttctaaggtcaatgccatt

SEQ ID NO: 3372 - DNA, 19 bp, Homo sapiens
tctaaggtcaatgccatta

SEQ ID NO: 3373 - DNA, 19 bp, Homo sapiens
ctaaggtcaatgccattat

SEQ ID NO: 3374 - DNA, 19 bp, Homo sapiens
taaggtcaatgccattatt

SEQ ID NO: 3375 - DNA, 19 bp, Homo sapiens
aaggtcaatgccattattt

SEQ ID NO: 3376 - DNA, 19 bp, Homo sapiens
aggtcaatgccattatttg

SEQ ID NO: 3377 - DNA, 19 bp, Homo sapiens
ggtcaatgccattatttga

SEQ ID NO: 3378 - DNA, 19 bp, Homo sapiens
gtcaatgccattatttgat

SEQ ID NO: 3379 - DNA, 19 bp, Homo sapiens
tcaatgccattatttgatt

SEQ ID NO: 3380 - DNA, 19 bp, Homo sapiens
caatgccattatttgatta

SEQ ID NO: 3381 - DNA, 19 bp, Homo sapiens
aatgccattatttgattat

SEQ ID NO: 3382 - DNA, 19 bp, Homo sapiens
atgccattatttgattata

SEQ ID NO: 3383 - DNA, 19 bp, Homo sapiens
tgccattatttgattatac

SEQ ID NO: 3384 - DNA, 19 bp, Homo sapiens
gccattatttgattatacc

SEQ ID NO: 3385 - DNA, 19 bp, Homo sapiens
ccattatttgattatacca

SEQ ID NO: 3386 - DNA, 19 bp, Homo sapiens
cattatttgattataccat

SEQ ID NO: 3387 - DNA, 19 bp, Homo sapiens
attatttgattataccatt

SEQ ID NO: 3388 - DNA, 19 bp, Homo sapiens
ttatttgattataccattt

SEQ ID NO: 3389 - DNA, 19 bp, Homo sapiens
tatttgattataccatttt

SEQ ID NO: 3390 - DNA, 19 bp, Homo sapiens
atttgattataccattttg

SEQ ID NO: 3391 - DNA, 19 bp, Homo sapiens
tttgattataccattttga

SEQ ID NO: 3392 - DNA, 19 bp, Homo sapiens
ttgattataccattttgag

SEQ ID NO: 3393 - DNA, 19 bp, Homo sapiens
tgattataccattttgagg

SEQ ID NO: 3394 - DNA, 19 bp, Homo sapiens
gattataccattttgaggg

SEQ ID NO: 3395 - DNA, 19 bp, Homo sapiens
attataccattttgagggt

SEQ ID NO: 3396 - DNA, 19 bp, Homo sapiens
ttataccattttgagggtg

SEQ ID NO: 3397 - DNA, 19 bp, Homo sapiens
tataccattttgagggtga

SEQ ID NO: 3398 - DNA, 19 bp, Homo sapiens
ataccattttgagggtgaa

SEQ ID NO: 3399 - DNA, 19 bp, Homo sapiens
taccattttgagggtgaat

SEQ ID NO: 3400 - DNA, 19 bp, Homo sapiens
accattttgagggtgaata

SEQ ID NO: 3401 - DNA, 19 bp, Homo sapiens
ccattttgagggtgaatat

SEQ ID NO: 3402 - DNA, 19 bp, Homo sapiens
cattttgagggtgaatatg

SEQ ID NO: 3403 - DNA, 19 bp, Homo sapiens
attttgagggtgaatatgg

SEQ ID NO: 3404 - DNA, 19 bp, Homo sapiens
ttttgagggtgaatatggc

SEQ ID NO: 3405 - DNA, 19 bp, Homo sapiens
tttgagggtgaatatggct

SEQ ID NO: 3406 - DNA, 19 bp, Homo sapiens
ttgagggtgaatatggcta

SEQ ID NO: 3407 - DNA, 19 bp, Homo sapiens
tgagggtgaatatggctag

SEQ ID NO: 3408 - DNA, 19 bp, Homo sapiens
gagggtgaatatggctagg

SEQ ID NO: 3409 - DNA, 19 bp, Homo sapiens
agggtgaatatggctaggc

SEQ ID NO: 3410 - DNA, 19 bp, Homo sapiens
gggtgaatatggctaggca

SEQ ID NO: 3411 - DNA, 19 bp, Homo sapiens
ggtgaatatggctaggcac

SEQ ID NO: 3412 - DNA, 19 bp, Homo sapiens
gtgaatatggctaggcact

SEQ ID NO: 3413 - DNA, 19 bp, Homo sapiens
tgaatatggctaggcactt

SEQ ID NO: 3414 - DNA, 19 bp, Homo sapiens
gaatatggctaggcacttt

SEQ ID NO: 3415 - DNA, 19 bp, Homo sapiens
aatatggctaggcacttta

SEQ ID NO: 3416 - DNA, 19 bp, Homo sapiens
atatggctaggcactttag

SEQ ID NO: 3417 - DNA, 19 bp, Homo sapiens
tatggctaggcactttaga

SEQ ID NO: 3418 - DNA, 19 bp, Homo sapiens
atggctaggcactttagat

SEQ ID NO: 3419 - DNA, 19 bp, Homo sapiens
tggctaggcactttagata

SEQ ID NO: 3420 - DNA, 19 bp, Homo sapiens
ggctaggcactttagataa

SEQ ID NO: 3421 - DNA, 19 bp, Homo sapiens
gctaggcactttagataag

SEQ ID NO: 3422 - DNA, 19 bp, Homo sapiens
ctaggcactttagataagc

SEQ ID NO: 3423 - DNA, 19 bp, Homo sapiens
taggcactttagataagcc

SEQ ID NO: 3424 - DNA, 19 bp, Homo sapiens
aggcactttagataagcct

SEQ ID NO: 3425 - DNA, 19 bp, Homo sapiens
ggcactttagataagcctt

SEQ ID NO: 3426 - DNA, 19 bp, Homo sapiens
gcactttagataagccttt

SEQ ID NO: 3427 - DNA, 19 bp, Homo sapiens
cactttagataagcctttt

SEQ ID NO: 3428 - DNA, 19 bp, Homo sapiens
actttagataagccttttt

SEQ ID NO: 3429 - DNA, 19 bp, Homo sapiens
ctttagataagccttttta

SEQ ID NO: 3430 - DNA, 19 bp, Homo sapiens
tttagataagcctttttaa

SEQ ID NO: 3431 - DNA, 19 bp, Homo sapiens
ttagataagcctttttaaa

SEQ ID NO: 3432 - DNA, 19 bp, Homo sapiens
tagataagcctttttaaaa

SEQ ID NO: 3433 - DNA, 19 bp, Homo sapiens
agataagcctttttaaaat

SEQ ID NO: 3434 - DNA, 19 bp, Homo sapiens
gataagcctttttaaaatt

SEQ ID NO: 3435 - DNA, 19 bp, Homo sapiens
ataagcctttttaaaattc

SEQ ID NO: 3436 - DNA, 19 bp, Homo sapiens
taagcctttttaaaattct

SEQ ID NO: 3437 - DNA, 19 bp, Homo sapiens
aagcctttttaaaattctt

SEQ ID NO: 3438 - DNA, 19 bp, Homo sapiens
agcctttttaaaattcttt

SEQ ID NO: 3439 - DNA, 19 bp, Homo sapiens
gcctttttaaaattctttc

SEQ ID NO: 3440 - DNA, 19 bp, Homo sapiens
cctttttaaaattctttct

SEQ ID NO: 3441 - DNA, 19 bp, Homo sapiens
ctttttaaaattctttctg

SEQ ID NO: 3442 - DNA, 19 bp, Homo sapiens
tttttaaaattctttctga

SEQ ID NO: 3443 - DNA, 19 bp, Homo sapiens
ttttaaaattctttctgat

SEQ ID NO: 3444 - DNA, 19 bp, Homo sapiens
tttaaaattctttctgatt

SEQ ID NO: 3445 - DNA, 19 bp, Homo sapiens
ttaaaattctttctgattt

SEQ ID NO: 3446 - DNA, 19 bp, Homo sapiens
taaaattctttctgatttt

SEQ ID NO: 3447 - DNA, 19 bp, Homo sapiens
aaaattctttctgatttta

SEQ ID NO: 3448 - DNA, 19 bp, Homo sapiens
aaattctttctgattttaa

SEQ ID NO: 3449 - DNA, 19 bp, Homo sapiens
aattctttctgattttaaa

SEQ ID NO: 3450 - DNA, 19 bp, Homo sapiens
attctttctgattttaaat

SEQ ID NO: 3451 - DNA, 19 bp, Homo sapiens
ttctttctgattttaaata

SEQ ID NO: 3452 - DNA, 19 bp, Homo sapiens
tctttctgattttaaataa

SEQ ID NO: 3453 - DNA, 19 bp, Homo sapiens
ctttctgattttaaataat

SEQ ID NO: 3454 - DNA, 19 bp, Homo sapiens
tttctgattttaaataatg

SEQ ID NO: 3455 - DNA, 19 bp, Homo sapiens
ttctgattttaaataatgc

SEQ ID NO: 3456 - DNA, 19 bp, Homo sapiens
tctgattttaaataatgcg

SEQ ID NO: 3457 - DNA, 19 bp, Homo sapiens
ctgattttaaataatgcgt

SEQ ID NO: 3458 - DNA, 19 bp, Homo sapiens
tgattttaaataatgcgtc

SEQ ID NO: 3459 - DNA, 19 bp, Homo sapiens
gattttaaataatgcgtca

SEQ ID NO: 3460 - DNA, 19 bp, Homo sapiens
attttaaataatgcgtcaa

SEQ ID NO: 3461 - DNA, 19 bp, Homo sapiens
ttttaaataatgcgtcaaa

SEQ ID NO: 3462 - DNA, 19 bp, Homo sapiens
tttaaataatgcgtcaaaa

SEQ ID NO: 3463 - DNA, 19 bp, Homo sapiens
ttaaataatgcgtcaaaaa

SEQ ID NO: 3464 - DNA, 19 bp, Homo sapiens
taaataatgcgtcaaaaaa

SEQ ID NO: 3465 - DNA, 19 bp, Homo sapiens
aaataatgcgtcaaaaaat

SEQ ID NO: 3466 - DNA, 19 bp, Homo sapiens
aataatgcgtcaaaaaatg

SEQ ID NO: 3467 - DNA, 19 bp, Homo sapiens
ataatgcgtcaaaaaatgt

SEQ ID NO: 3468 - DNA, 19 bp, Homo sapiens
taatgcgtcaaaaaatgtg

SEQ ID NO: 3469 - DNA, 19 bp, Homo sapiens
aatgcgtcaaaaaatgtgc

SEQ ID NO: 3470 - DNA, 19 bp, Homo sapiens
atgcgtcaaaaaatgtgca

SEQ ID NO: 3471 - DNA, 19 bp, Homo sapiens
tgcgtcaaaaaatgtgcag

SEQ ID NO: 3472 - DNA, 19 bp, Homo sapiens
gcgtcaaaaaatgtgcaga

SEQ ID NO: 3473 - DNA, 19 bp, Homo sapiens
cgtcaaaaaatgtgcagaa

SEQ ID NO: 3474 - DNA, 19 bp, Homo sapiens
gtcaaaaaatgtgcagaaa

SEQ ID NO: 3475 - DNA, 19 bp, Homo sapiens
tcaaaaaatgtgcagaaaa

SEQ ID NO: 3476 - DNA, 19 bp, Homo sapiens
caaaaaatgtgcagaaaat

SEQ ID NO: 3477 - DNA, 19 bp, Homo sapiens
aaaaaatgtgcagaaaatg

SEQ ID NO: 3478 - DNA, 19 bp, Homo sapiens
aaaaatgtgcagaaaatgt

SEQ ID NO: 3479 - DNA, 19 bp, Homo sapiens
aaaatgtgcagaaaatgta

SEQ ID NO: 3480 - DNA, 19 bp, Homo sapiens
aaatgtgcagaaaatgtat

SEQ ID NO: 3481 - DNA, 19 bp, Homo sapiens
aatgtgcagaaaatgtatt

SEQ ID NO: 3482 - DNA, 19 bp, Homo sapiens
atgtgcagaaaatgtattg

SEQ ID NO: 3483 - DNA, 19 bp, Homo sapiens
tgtgcagaaaatgtattgc

SEQ ID NO: 3484 - DNA, 19 bp, Homo sapiens
gtgcagaaaatgtattgca

SEQ ID NO: 3485 - DNA, 19 bp, Homo sapiens
tgcagaaaatgtattgcat

SEQ ID NO: 3486 - DNA, 19 bp, Homo sapiens
gcagaaaatgtattgcatc

SEQ ID NO: 3487 - DNA, 19 bp, Homo sapiens
cagaaaatgtattgcatcc

SEQ ID NO: 3488 - DNA, 19 bp, Homo sapiens
agaaaatgtattgcatccc

SEQ ID NO: 3489 - DNA, 19 bp, Homo sapiens
gaaaatgtattgcatccct

SEQ ID NO: 3490 - DNA, 19 bp, Homo sapiens
aaaatgtattgcatccctt

SEQ ID NO: 3491 - DNA, 19 bp, Homo sapiens
aaatgtattgcatcccttg

SEQ ID NO: 3492 - DNA, 19 bp, Homo sapiens
aatgtattgcatcccttga

SEQ ID NO: 3493 - DNA, 19 bp, Homo sapiens
atgtattgcatcccttgat

SEQ ID NO: 3494 - DNA, 19 bp, Homo sapiens
tgtattgcatcccttgata

SEQ ID NO: 3495 - DNA, 19 bp, Homo sapiens
gtattgcatcccttgatac

SEQ ID NO: 3496 - DNA, 19 bp, Homo sapiens
tattgcatcccttgatact

SEQ ID NO: 3497 - DNA, 19 bp, Homo sapiens
attgcatcccttgatactg

SEQ ID NO: 3498 - DNA, 19 bp, Homo sapiens
ttgcatcccttgatactgt

SEQ ID NO: 3499 - DNA, 19 bp, Homo sapiens
tgcatcccttgatactgtc

SEQ ID NO: 3500 - DNA, 19 bp, Homo sapiens
gcatcccttgatactgtct

SEQ ID NO: 3501 - DNA, 19 bp, Homo sapiens
catcccttgatactgtcta

SEQ ID NO: 3502 - DNA, 19 bp, Homo sapiens
atcccttgatactgtctaa

SEQ ID NO: 3503 - DNA, 19 bp, Homo sapiens
tcccttgatactgtctaac

SEQ ID NO: 3504 - DNA, 19 bp, Homo sapiens
cccttgatactgtctaacg

SEQ ID NO: 3505 - DNA, 19 bp, Homo sapiens
ccttgatactgtctaacga

SEQ ID NO: 3506 - DNA, 19 bp, Homo sapiens
cttgatactgtctaacgaa

SEQ ID NO: 3507 - DNA, 19 bp, Homo sapiens
ttgatactgtctaacgaat

SEQ ID NO: 3508 - DNA, 19 bp, Homo sapiens
tgatactgtctaacgaata

SEQ ID NO: 3509 - DNA, 19 bp, Homo sapiens
gatactgtctaacgaatag

SEQ ID NO: 3510 - DNA, 19 bp, Homo sapiens
atactgtctaacgaatagc

SEQ ID NO: 3511 - DNA, 19 bp, Homo sapiens
tactgtctaacgaatagca

SEQ ID NO: 3512 - DNA, 19 bp, Homo sapiens
actgtctaacgaatagcac

SEQ ID NO: 3513 - DNA, 19 bp, Homo sapiens
ctgtctaacgaatagcaca

SEQ ID NO: 3514 - DNA, 19 bp, Homo sapiens
tgtctaacgaatagcacat

SEQ ID NO: 3515 - DNA, 19 bp, Homo sapiens
gtctaacgaatagcacata

SEQ ID NO: 3516 - DNA, 19 bp, Homo sapiens
tctaacgaatagcacataa

SEQ ID NO: 3517 - DNA, 19 bp, Homo sapiens
ctaacgaatagcacataac

SEQ ID NO: 3518 - DNA, 19 bp, Homo sapiens
taacgaatagcacataact

SEQ ID NO: 3519 - DNA, 19 bp, Homo sapiens
aacgaatagcacataactc

SEQ ID NO: 3520 - DNA, 19 bp, Homo sapiens
acgaatagcacataactca

SEQ ID NO: 3521 - DNA, 19 bp, Homo sapiens
cgaatagcacataactcat

SEQ ID NO: 3522 - DNA, 19 bp, Homo sapiens
gaatagcacataactcata

SEQ ID NO: 3523 - DNA, 19 bp, Homo sapiens
aatagcacataactcatat

SEQ ID NO: 3524 - DNA, 19 bp, Homo sapiens
atagcacataactcatatt

SEQ ID NO: 3525 - DNA, 19 bp, Homo sapiens
tagcacataactcatattg

SEQ ID NO: 3526 - DNA, 19 bp, Homo sapiens
agcacataactcatattgt

SEQ ID NO: 3527 - DNA, 19 bp, Homo sapiens
gcacataactcatattgtg

SEQ ID NO: 3528 - DNA, 19 bp, Homo sapiens
cacataactcatattgtga

SEQ ID NO: 3529 - DNA, 19 bp, Homo sapiens
acataactcatattgtgaa

SEQ ID NO: 3530 - DNA, 19 bp, Homo sapiens
cataactcatattgtgaat

SEQ ID NO: 3531 - DNA, 19 bp, Homo sapiens
ataactcatattgtgaatc

SEQ ID NO: 3532 - DNA, 19 bp, Homo sapiens
taactcatattgtgaatcc

SEQ ID NO: 3533 - DNA, 19 bp, Homo sapiens
aactcatattgtgaatcct

SEQ ID NO: 3534 - DNA, 19 bp, Homo sapiens
actcatattgtgaatccta

SEQ ID NO: 3535 - DNA, 19 bp, Homo sapiens
ctcatattgtgaatcctat

SEQ ID NO: 3536 - DNA, 19 bp, Homo sapiens
tcatattgtgaatcctatg

SEQ ID NO: 3537 - DNA, 19 bp, Homo sapiens
catattgtgaatcctatgg

SEQ ID NO: 3538 - DNA, 19 bp, Homo sapiens
atattgtgaatcctatggg

SEQ ID NO: 3539 - DNA, 19 bp, Homo sapiens
tattgtgaatcctatgggt

SEQ ID NO: 3540 - DNA, 19 bp, Homo sapiens
attgtgaatcctatgggtc

SEQ ID NO: 3541 - DNA, 19 bp, Homo sapiens
ttgtgaatcctatgggtct

SEQ ID NO: 3542 - DNA, 19 bp, Homo sapiens
tgtgaatcctatgggtctt

SEQ ID NO: 3543 - DNA, 19 bp, Homo sapiens
gtgaatcctatgggtcttg

SEQ ID NO: 3544 - DNA, 19 bp, Homo sapiens
tgaatcctatgggtcttga

SEQ ID NO: 3545 - DNA, 19 bp, Homo sapiens
gaatcctatgggtcttgag

SEQ ID NO: 3546 - DNA, 19 bp, Homo sapiens
aatcctatgggtcttgagg

SEQ ID NO: 3547 - DNA, 19 bp, Homo sapiens
atcctatgggtcttgaggc

SEQ ID NO: 3548 - DNA, 19 bp, Homo sapiens
tcctatgggtcttgaggcc

SEQ ID NO: 3549 - DNA, 19 bp, Homo sapiens
cctatgggtcttgaggcct

SEQ ID NO: 3550 - DNA, 19 bp, Homo sapiens
ctatgggtcttgaggcctg

SEQ ID NO: 3551 - DNA, 19 bp, Homo sapiens
tatgggtcttgaggcctgt

SEQ ID NO: 3552 - DNA, 19 bp, Homo sapiens
atgggtcttgaggcctgta

SEQ ID NO: 3553 - DNA, 19 bp, Homo sapiens
tgggtcttgaggcctgtag

SEQ ID NO: 3554 - DNA, 19 bp, Homo sapiens
gggtcttgaggcctgtaga

SEQ ID NO: 3555 - DNA, 19 bp, Homo sapiens
ggtcttgaggcctgtagaa

SEQ ID NO: 3556 - DNA, 19 bp, Homo sapiens
gtcttgaggcctgtagaac

SEQ ID NO: 3557 - DNA, 19 bp, Homo sapiens
tcttgaggcctgtagaacc

SEQ ID NO: 3558 - DNA, 19 bp, Homo sapiens
cttgaggcctgtagaacca

SEQ ID NO: 3559 - DNA, 19 bp, Homo sapiens
ttgaggcctgtagaaccaa

SEQ ID NO: 3560 - DNA, 19 bp, Homo sapiens
tgaggcctgtagaaccaat

SEQ ID NO: 3561 - DNA, 19 bp, Homo sapiens
gaggcctgtagaaccaatc

SEQ ID NO: 3562 - DNA, 19 bp, Homo sapiens
atgggtgataactgtggtg

SEQ ID NO: 3563 - DNA, 19 bp, Homo sapiens
catgggtgataactgtggt

SEQ ID NO: 3564 - DNA, 19 bp, Homo sapiens
gcatgggtgataactgtgg

SEQ ID NO: 3565 - DNA, 19 bp, Homo sapiens
ggcatgggtgataactgtg

SEQ ID NO: 3566 - DNA, 19 bp, Homo sapiens
gggcatgggtgataactgt

SEQ ID NO: 3567 - DNA, 19 bp, Homo sapiens
agggcatgggtgataactg

SEQ ID NO: 3568 - DNA, 19 bp, Homo sapiens
gagggcatgggtgataact

SEQ ID NO: 3569 - DNA, 19 bp, Homo sapiens
ggagggcatgggtgataac

SEQ ID NO: 3570 - DNA, 19 bp, Homo sapiens
aggagggcatgggtgataa

SEQ ID NO: 3571 - DNA, 19 bp, Homo sapiens
taggagggcatgggtgata

SEQ ID NO: 3572 - DNA, 19 bp, Homo sapiens
ttaggagggcatgggtgat

SEQ ID NO: 3573 - DNA, 19 bp, Homo sapiens
tttaggagggcatgggtga

SEQ ID NO: 3574 - DNA, 19 bp, Homo sapiens
ttttaggagggcatgggtg

SEQ ID NO: 3575 - DNA, 19 bp, Homo sapiens
cttttaggagggcatgggt

SEQ ID NO: 3576 - DNA, 19 bp, Homo sapiens
ccttttaggagggcatggg

SEQ ID NO: 3577 - DNA, 19 bp, Homo sapiens
cccttttaggagggcatgg

SEQ ID NO: 3578 - DNA, 19 bp, Homo sapiens
acccttttaggagggcatg

SEQ ID NO: 3579 - DNA, 19 bp, Homo sapiens
cacccttttaggagggcat

SEQ ID NO: 3580 - DNA, 19 bp, Homo sapiens
acacccttttaggagggca

SEQ ID NO: 3581 - DNA, 19 bp, Homo sapiens
gacacccttttaggagggc

SEQ ID NO: 3582 - DNA, 19 bp, Homo sapiens
agacacccttttaggaggg

SEQ ID NO: 3583 - DNA, 19 bp, Homo sapiens
gagacacccttttaggagg

SEQ ID NO: 3584 - DNA, 19 bp, Homo sapiens
tgagacacccttttaggag

SEQ ID NO: 3585 - DNA, 19 bp, Homo sapiens
ttgagacacccttttagga

SEQ ID NO: 3586 - DNA, 19 bp, Homo sapiens
tttgagacacccttttagg

SEQ ID NO: 3587 - DNA, 19 bp, Homo sapiens
ctttgagacacccttttag

SEQ ID NO: 3588 - DNA, 19 bp, Homo sapiens
gctttgagacaccctttta

SEQ ID NO: 3589 - DNA, 19 bp, Homo sapiens
tgctttgagacaccctttt

SEQ ID NO: 3590 - DNA, 19 bp, Homo sapiens
atgctttgagacacccttt

SEQ ID NO: 3591 - DNA, 19 bp, Homo sapiens
tatgctttgagacaccctt

SEQ ID NO: 3592 - DNA, 19 bp, Homo sapiens
atatgctttgagacaccct

SEQ ID NO: 3593 - DNA, 19 bp, Homo sapiens
gatatgctttgagacaccc

SEQ ID NO: 3594 - DNA, 19 bp, Homo sapiens
agatatgctttgagacacc

SEQ ID NO: 3595 - DNA, 19 bp, Homo sapiens
aagatatgctttgagacac

SEQ ID NO: 3596 - DNA, 19 bp, Homo sapiens
aaagatatgctttgagaca

SEQ ID NO: 3597 - DNA, 19 bp, Homo sapiens
gaaagatatgctttgagac

SEQ ID NO: 3598 - DNA, 19 bp, Homo sapiens
agaaagatatgctttgaga

SEQ ID NO: 3599 - DNA, 19 bp, Homo sapiens
cagaaagatatgctttgag

SEQ ID NO: 3600 - DNA, 19 bp, Homo sapiens
acagaaagatatgctttga

SEQ ID NO: 3601 - DNA, 19 bp, Homo sapiens
tacagaaagatatgctttg

SEQ ID NO: 3602 - DNA, 19 bp, Homo sapiens
ctacagaaagatatgcttt

SEQ ID NO: 3603 - DNA, 19 bp, Homo sapiens
tctacagaaagatatgctt

SEQ ID NO: 3604 - DNA, 19 bp, Homo sapiens
ctctacagaaagatatgct

SEQ ID NO: 3605 - DNA, 19 bp, Homo sapiens
gctctacagaaagatatgc

SEQ ID NO: 3606 - DNA, 19 bp, Homo sapiens
tgctctacagaaagatatg

SEQ ID NO: 3607 - DNA, 19 bp, Homo sapiens
ctgctctacagaaagatat

SEQ ID NO: 3608 - DNA, 19 bp, Homo sapiens
tctgctctacagaaagata

SEQ ID NO: 3609 - DNA, 19 bp, Homo sapiens
ttctgctctacagaaagat

SEQ ID NO: 3610 - DNA, 19 bp, Homo sapiens
attctgctctacagaaaga

SEQ ID NO: 3611 - DNA, 19 bp, Homo sapiens
aattctgctctacagaaag

SEQ ID NO: 3612 - DNA, 19 bp, Homo sapiens
gaattctgctctacagaaa

SEQ ID NO: 3613 - DNA, 19 bp, Homo sapiens
cgaattctgctctacagaa

SEQ ID NO: 3614 - DNA, 19 bp, Homo sapiens
ccgaattctgctctacaga

SEQ ID NO: 3615 - DNA, 19 bp, Homo sapiens
tccgaattctgctctacag

SEQ ID NO: 3616 - DNA, 19 bp, Homo sapiens
ttccgaattctgctctaca

SEQ ID NO: 3617 - DNA, 19 bp, Homo sapiens
gttccgaattctgctctac

SEQ ID NO: 3618 - DNA, 19 bp, Homo sapiens
agttccgaattctgctcta

SEQ ID NO: 3619 - DNA, 19 bp, Homo sapiens
cagttccgaattctgctct

SEQ ID NO: 3620 - DNA, 19 bp, Homo sapiens
tcagttccgaattctgctc

SEQ ID NO: 3621 - DNA, 19 bp, Homo sapiens
ctcagttccgaattctgct

SEQ ID NO: 3622 - DNA, 19 bp, Homo sapiens
tctcagttccgaattctgc

SEQ ID NO: 3623 - DNA, 19 bp, Homo sapiens
ttctcagttccgaattctg

SEQ ID NO: 3624 - DNA, 19 bp, Homo sapiens
cttctcagttccgaattct

SEQ ID NO: 3625 - DNA, 19 bp, Homo sapiens
tcttctcagttccgaattc

SEQ ID NO: 3626 - DNA, 19 bp, Homo sapiens
gtcttctcagttccgaatt

SEQ ID NO: 3627 - DNA, 19 bp, Homo sapiens
cgtcttctcagttccgaat

SEQ ID NO: 3628 - DNA, 19 bp, Homo sapiens
tcgtcttctcagttccgaa

SEQ ID NO: 3629 - DNA, 19 bp, Homo sapiens
ctcgtcttctcagttccga

SEQ ID NO: 3630 - DNA, 19 bp, Homo sapiens
cctcgtcttctcagttccg

SEQ ID NO: 3631 - DNA, 19 bp, Homo sapiens
ccctcgtcttctcagttcc

SEQ ID NO: 3632 - DNA, 19 bp, Homo sapiens
gccctcgtcttctcagttc

SEQ ID NO: 3633 - DNA, 19 bp, Homo sapiens
agccctcgtcttctcagtt

SEQ ID NO: 3634 - DNA, 19 bp, Homo sapiens
gagccctcgtcttctcagt

SEQ ID NO: 3635 - DNA, 19 bp, Homo sapiens
tgagccctcgtcttctcag

SEQ ID NO: 3636 - DNA, 19 bp, Homo sapiens
ttgagccctcgtcttctca

SEQ ID NO: 3637 - DNA, 19 bp, Homo sapiens
tttgagccctcgtcttctc

SEQ ID NO: 3638 - DNA, 19 bp, Homo sapiens
atttgagccctcgtcttct

SEQ ID NO: 3639 - DNA, 19 bp, Homo sapiens
aatttgagccctcgtcttc

SEQ ID NO: 3640 - DNA, 19 bp, Homo sapiens
caatttgagccctcgtctt

SEQ ID NO: 3641 - DNA, 19 bp, Homo sapiens
tcaatttgagccctcgtct

SEQ ID NO: 3642 - DNA, 19 bp, Homo sapiens
ttcaatttgagccctcgtc

SEQ ID NO: 3643 - DNA, 19 bp, Homo sapiens
attcaatttgagccctcgt

SEQ ID NO: 3644 - DNA, 19 bp, Homo sapiens
gattcaatttgagccctcg

SEQ ID NO: 3645 - DNA, 19 bp, Homo sapiens
agattcaatttgagccctc

SEQ ID NO: 3646 - DNA, 19 bp, Homo sapiens
gagattcaatttgagccct

SEQ ID NO: 3647 - DNA, 19 bp, Homo sapiens
tgagattcaatttgagccc

SEQ ID NO: 3648 - DNA, 19 bp, Homo sapiens
gtgagattcaatttgagcc

SEQ ID NO: 3649 - DNA, 19 bp, Homo sapiens
tgtgagattcaatttgagc

SEQ ID NO: 3650 - DNA, 19 bp, Homo sapiens
ctgtgagattcaatttgag

SEQ ID NO: 3651 - DNA, 19 bp, Homo sapiens
cctgtgagattcaatttga

SEQ ID NO: 3652 - DNA, 19 bp, Homo sapiens
tcctgtgagattcaatttg

SEQ ID NO: 3653 - DNA, 19 bp, Homo sapiens
atcctgtgagattcaattt

SEQ ID NO: 3654 - DNA, 19 bp, Homo sapiens
aatcctgtgagattcaatt

SEQ ID NO: 3655 - DNA, 19 bp, Homo sapiens
aaatcctgtgagattcaat

SEQ ID NO: 3656 - DNA, 19 bp, Homo sapiens
caaatcctgtgagattcaa

SEQ ID NO: 3657 - DNA, 19 bp, Homo sapiens
gcaaatcctgtgagattca

SEQ ID NO: 3658 - DNA, 19 bp, Homo sapiens
cgcaaatcctgtgagattc

SEQ ID NO: 3659 - DNA, 19 bp, Homo sapiens
acgcaaatcctgtgagatt

SEQ ID NO: 3660 - DNA, 19 bp, Homo sapiens
cacgcaaatcctgtgagat

SEQ ID NO: 3661 - DNA, 19 bp, Homo sapiens
gcacgcaaatcctgtgaga

SEQ ID NO: 3662 - DNA, 19 bp, Homo sapiens
tgcacgcaaatcctgtgag

SEQ ID NO: 3663 - DNA, 19 bp, Homo sapiens
ttgcacgcaaatcctgtga

SEQ ID NO: 3664 - DNA, 19 bp, Homo sapiens
cttgcacgcaaatcctgtg

SEQ ID NO: 3665 - DNA, 19 bp, Homo sapiens
tcttgcacgcaaatcctgt

SEQ ID NO: 3666 - DNA, 19 bp, Homo sapiens
ctcttgcacgcaaatcctg

SEQ ID NO: 3667 - DNA, 19 bp, Homo sapiens
tctcttgcacgcaaatcct

SEQ ID NO: 3668 - DNA, 19 bp, Homo sapiens
ttctcttgcacgcaaatcc

SEQ ID NO: 3669 - DNA, 19 bp, Homo sapiens
tttctcttgcacgcaaatc

SEQ ID NO: 3670 - DNA, 19 bp, Homo sapiens
gtttctcttgcacgcaaat

SEQ ID NO: 3671 - DNA, 19 bp, Homo sapiens
ggtttctcttgcacgcaaa

SEQ ID NO: 3672 - DNA, 19 bp, Homo sapiens
gggtttctcttgcacgcaa

SEQ ID NO: 3673 - DNA, 19 bp, Homo sapiens
tgggtttctcttgcacgca

SEQ ID NO: 3674 - DNA, 19 bp, Homo sapiens
ttgggtttctcttgcacgc

SEQ ID NO: 3675 - DNA, 19 bp, Homo sapiens
tttgggtttctcttgcacg

SEQ ID NO: 3676 - DNA, 19 bp, Homo sapiens
ctttgggtttctcttgcac

SEQ ID NO: 3677 - DNA, 19 bp, Homo sapiens
cctttgggtttctcttgca

SEQ ID NO: 3678 - DNA, 19 bp, Homo sapiens
tcctttgggtttctcttgc

SEQ ID NO: 3679 - DNA, 19 bp, Homo sapiens
ttcctttgggtttctcttg

SEQ ID NO: 3680 - DNA, 19 bp, Homo sapiens
attcctttgggtttctctt

SEQ ID NO: 3681 - DNA, 19 bp, Homo sapiens
cattcctttgggtttctct

SEQ ID NO: 3682 - DNA, 19 bp, Homo sapiens
ccattcctttgggtttctc

SEQ ID NO: 3683 - DNA, 19 bp, Homo sapiens
tccattcctttgggtttct

SEQ ID NO: 3684 - DNA, 19 bp, Homo sapiens
atccattcctttgggtttc

SEQ ID NO: 3685 - DNA, 19 bp, Homo sapiens
aatccattcctttgggttt

SEQ ID NO: 3686 - DNA, 19 bp, Homo sapiens
caatccattcctttgggtt

SEQ ID NO: 3687 - DNA, 19 bp, Homo sapiens
ccaatccattcctttgggt

SEQ ID NO: 3688 - DNA, 19 bp, Homo sapiens
gccaatccattcctttggg

SEQ ID NO: 3689 - DNA, 19 bp, Homo sapiens
agccaatccattcctttgg

SEQ ID NO: 3690 - DNA, 19 bp, Homo sapiens
gagccaatccattcctttg

SEQ ID NO: 3691 - DNA, 19 bp, Homo sapiens
agagccaatccattccttt

SEQ ID NO: 3692 - DNA, 19 bp, Homo sapiens
aagagccaatccattcctt

SEQ ID NO: 3693 - DNA, 19 bp, Homo sapiens
gaagagccaatccattcct

SEQ ID NO: 3694 - DNA, 19 bp, Homo sapiens
agaagagccaatccattcc

SEQ ID NO: 3695 - DNA, 19 bp, Homo sapiens
aagaagagccaatccattc

SEQ ID NO: 3696 - DNA, 19 bp, Homo sapiens
gaagaagagccaatccatt

SEQ ID NO: 3697 - DNA, 19 bp, Homo sapiens
tgaagaagagccaatccat

SEQ ID NO: 3698 - DNA, 19 bp, Homo sapiens
ctgaagaagagccaatcca

SEQ ID NO: 3699 - DNA, 19 bp, Homo sapiens
tctgaagaagagccaatcc

SEQ ID NO: 3700 - DNA, 19 bp, Homo sapiens
ttctgaagaagagccaatc

SEQ ID NO: 3701 - DNA, 19 bp, Homo sapiens
tttctgaagaagagccaat

SEQ ID NO: 3702 - DNA, 19 bp, Homo sapiens
gtttctgaagaagagccaa

SEQ ID NO: 3703 - DNA, 19 bp, Homo sapiens
tgtttctgaagaagagcca

SEQ ID NO: 3704 - DNA, 19 bp, Homo sapiens
atgtttctgaagaagagcc

SEQ ID NO: 3705 - DNA, 19 bp, Homo sapiens
aatgtttctgaagaagagc

SEQ ID NO: 3706 - DNA, 19 bp, Homo sapiens
aaatgtttctgaagaagag

SEQ ID NO: 3707 - DNA, 19 bp, Homo sapiens
caaatgtttctgaagaaga

SEQ ID NO: 3708 - DNA, 19 bp, Homo sapiens
gcaaatgtttctgaagaag

SEQ ID NO: 3709 - DNA, 19 bp, Homo sapiens
ggcaaatgtttctgaagaa

SEQ ID NO: 3710 - DNA, 19 bp, Homo sapiens
aggcaaatgtttctgaaga

SEQ ID NO: 3711 - DNA, 19 bp, Homo sapiens
aaggcaaatgtttctgaag

SEQ ID NO: 3712 - DNA, 19 bp, Homo sapiens
aaaggcaaatgtttctgaa

SEQ ID NO: 3713 - DNA, 19 bp, Homo sapiens
aaaaggcaaatgtttctga

SEQ ID NO: 3714 - DNA, 19 bp, Homo sapiens
caaaaggcaaatgtttctg

SEQ ID NO: 3715 - DNA, 19 bp, Homo sapiens
tcaaaaggcaaatgtttct

SEQ ID NO: 3716 - DNA, 19 bp, Homo sapiens
atcaaaaggcaaatgtttc

SEQ ID NO: 3717 - DNA, 19 bp, Homo sapiens
gatcaaaaggcaaatgttt

SEQ ID NO: 3718 - DNA, 19 bp, Homo sapiens
tgatcaaaaggcaaatgtt

SEQ ID NO: 3719 - DNA, 19 bp, Homo sapiens
atgatcaaaaggcaaatgt

SEQ ID NO: 3720 - DNA, 19 bp, Homo sapiens
aatgatcaaaaggcaaatg

SEQ ID NO: 3721 - DNA, 19 bp, Homo sapiens
gaatgatcaaaaggcaaat

SEQ ID NO: 3722 - DNA, 19 bp, Homo sapiens
agaatgatcaaaaggcaaa

SEQ ID NO: 3723 - DNA, 19 bp, Homo sapiens
tagaatgatcaaaaggcaa

SEQ ID NO: 3724 - DNA, 19 bp, Homo sapiens
ttagaatgatcaaaaggca

SEQ ID NO: 3725 - DNA, 19 bp, Homo sapiens
attagaatgatcaaaaggc

SEQ ID NO: 3726 - DNA, 19 bp, Homo sapiens
cattagaatgatcaaaagg

SEQ ID NO: 3727 - DNA, 19 bp, Homo sapiens
ccattagaatgatcaaaag

SEQ ID NO: 3728 - DNA, 19 bp, Homo sapiens
accattagaatgatcaaaa

SEQ ID NO: 3729 - DNA, 19 bp, Homo sapiens
caccattagaatgatcaaa

SEQ ID NO: 3730 - DNA, 19 bp, Homo sapiens
ccaccattagaatgatcaa

SEQ ID NO: 3731 - DNA, 19 bp, Homo sapiens
accaccattagaatgatca

SEQ ID NO: 3732 - DNA, 19 bp, Homo sapiens
caccaccattagaatgatc

SEQ ID NO: 3733 - DNA, 19 bp, Homo sapiens
tcaccaccattagaatgat

SEQ ID NO: 3734 - DNA, 19 bp, Homo sapiens
atcaccaccattagaatga

SEQ ID NO: 3735 - DNA, 19 bp, Homo sapiens
catcaccaccattagaatg

SEQ ID NO: 3736 - DNA, 19 bp, Homo sapiens
ccatcaccaccattagaat

SEQ ID NO: 3737 - DNA, 19 bp, Homo sapiens
tccatcaccaccattagaa

SEQ ID NO: 3738 - DNA, 19 bp, Homo sapiens
ttccatcaccaccattaga

SEQ ID NO: 3739 - DNA, 19 bp, Homo sapiens
cttccatcaccaccattag

SEQ ID NO: 3740 - DNA, 19 bp, Homo sapiens
acttccatcaccaccatta

SEQ ID NO: 3741 - DNA, 19 bp, Homo sapiens
tacttccatcaccaccatt

SEQ ID NO: 3742 - DNA, 19 bp, Homo sapiens
ttacttccatcaccaccat

SEQ ID NO: 3743 - DNA, 19 bp, Homo sapiens
tttacttccatcaccacca

SEQ ID NO: 3744 - DNA, 19 bp, Homo sapiens
gtttacttccatcaccacc

SEQ ID NO: 3745 - DNA, 19 bp, Homo sapiens
tgtttacttccatcaccac

SEQ ID NO: 3746 - DNA, 19 bp, Homo sapiens
ctgtttacttccatcacca

SEQ ID NO: 3747 - DNA, 19 bp, Homo sapiens
actgtttacttccatcacc

SEQ ID NO: 3748 - DNA, 19 bp, Homo sapiens
cactgtttacttccatcac

SEQ ID NO: 3749 - DNA, 19 bp, Homo sapiens
tcactgtttacttccatca

SEQ ID NO: 3750 - DNA, 19 bp, Homo sapiens
ttcactgtttacttccatc

SEQ ID NO: 3751 - DNA, 19 bp, Homo sapiens
attcactgtttacttccat

SEQ ID NO: 3752 - DNA, 19 bp, Homo sapiens
aattcactgtttacttcca

SEQ ID NO: 3753 - DNA, 19 bp, Homo sapiens
aaattcactgtttacttcc

SEQ ID NO: 3754 - DNA, 19 bp, Homo sapiens
taaattcactgtttacttc

SEQ ID NO: 3755 - DNA, 19 bp, Homo sapiens
ataaattcactgtttactt

SEQ ID NO: 3756 - DNA, 19 bp, Homo sapiens
aataaattcactgtttact

SEQ ID NO: 3757 - DNA, 19 bp, Homo sapiens
caataaattcactgtttac

SEQ ID NO: 3758 - DNA, 19 bp, Homo sapiens
acaataaattcactgttta

SEQ ID NO: 3759 - DNA, 19 bp, Homo sapiens
aacaataaattcactgttt

SEQ ID NO: 3760 - DNA, 19 bp, Homo sapiens
caacaataaattcactgtt

SEQ ID NO: 3761 - DNA, 19 bp, Homo sapiens
tcaacaataaattcactgt

SEQ ID NO: 3762 - DNA, 19 bp, Homo sapiens
ctcaacaataaattcactg

SEQ ID NO: 3763 - DNA, 19 bp, Homo sapiens
cctcaacaataaattcact

SEQ ID NO: 3764 - DNA, 19 bp, Homo sapiens
acctcaacaataaattcac

SEQ ID NO: 3765 - DNA, 19 bp, Homo sapiens
cacctcaacaataaattca

SEQ ID NO: 3766 - DNA, 19 bp, Homo sapiens
tcacctcaacaataaattc

SEQ ID NO: 3767 - DNA, 19 bp, Homo sapiens
ttcacctcaacaataaatt

SEQ ID NO: 3768 - DNA, 19 bp, Homo sapiens
cttcacctcaacaataaat

SEQ ID NO: 3769 - DNA, 19 bp, Homo sapiens
ccttcacctcaacaataaa

SEQ ID NO: 3770 - DNA, 19 bp, Homo sapiens
tccttcacctcaacaataa

SEQ ID NO: 3771 - DNA, 19 bp, Homo sapiens
ttccttcacctcaacaata

SEQ ID NO: 3772 - DNA, 19 bp, Homo sapiens
attccttcacctcaacaat

SEQ ID NO: 3773 - DNA, 19 bp, Homo sapiens
aattccttcacctcaacaa

SEQ ID NO: 3774 - DNA, 19 bp, Homo sapiens
aaattccttcacctcaaca

SEQ ID NO: 3775 - DNA, 19 bp, Homo sapiens
caaattccttcacctcaac

SEQ ID NO: 3776 - DNA, 19 bp, Homo sapiens
tcaaattccttcacctcaa

SEQ ID NO: 3777 - DNA, 19 bp, Homo sapiens
gtcaaattccttcacctca

SEQ ID NO: 3778 - DNA, 19 bp, Homo sapiens
tgtcaaattccttcacctc

SEQ ID NO: 3779 - DNA, 19 bp, Homo sapiens
atgtcaaattccttcacct

SEQ ID NO: 3780 - DNA, 19 bp, Homo sapiens
aatgtcaaattccttcacc

SEQ ID NO: 3781 - DNA, 19 bp, Homo sapiens
caatgtcaaattccttcac

SEQ ID NO: 3782 - DNA, 19 bp, Homo sapiens
tcaatgtcaaattccttca

SEQ ID NO: 3783 - DNA, 19 bp, Homo sapiens
ttcaatgtcaaattccttc

SEQ ID NO: 3784 - DNA, 19 bp, Homo sapiens
tttcaatgtcaaattcctt

SEQ ID NO: 3785 - DNA, 19 bp, Homo sapiens
ttttcaatgtcaaattcct

SEQ ID NO: 3786 - DNA, 19 bp, Homo sapiens
attttcaatgtcaaattcc

SEQ ID NO: 3787 - DNA, 19 bp, Homo sapiens
cattttcaatgtcaaattc

SEQ ID NO: 3788 - DNA, 19 bp, Homo sapiens
ccattttcaatgtcaaatt

SEQ ID NO: 3789 - DNA, 19 bp, Homo sapiens
gccattttcaatgtcaaat

SEQ ID NO: 3790 - DNA, 19 bp, Homo sapiens
tgccattttcaatgtcaaa

SEQ ID NO: 3791 - DNA, 19 bp, Homo sapiens
gtgccattttcaatgtcaa

SEQ ID NO: 3792 - DNA, 19 bp, Homo sapiens
agtgccattttcaatgtca

SEQ ID NO: 3793 - DNA, 19 bp, Homo sapiens
tagtgccattttcaatgtc

SEQ ID NO: 3794 - DNA, 19 bp, Homo sapiens
gtagtgccattttcaatgt

SEQ ID NO: 3795 - DNA, 19 bp, Homo sapiens
tgtagtgccattttcaatg

SEQ ID NO: 3796 - DNA, 19 bp, Homo sapiens
ttgtagtgccattttcaat

SEQ ID NO: 3797 - DNA, 19 bp, Homo sapiens
tttgtagtgccattttcaa

SEQ ID NO: 3798 - DNA, 19 bp, Homo sapiens
ttttgtagtgccattttca

SEQ ID NO: 3799 - DNA, 19 bp, Homo sapiens
attttgtagtgccattttc

SEQ ID NO: 3800 - DNA, 19 bp, Homo sapiens
cattttgtagtgccatttt

SEQ ID NO: 3801 - DNA, 19 bp, Homo sapiens
ccattttgtagtgccattt

SEQ ID NO: 3802 - DNA, 19 bp, Homo sapiens
gccattttgtagtgccatt

SEQ ID NO: 3803 - DNA, 19 bp, Homo sapiens
tgccattttgtagtgccat

SEQ ID NO: 3804 - DNA, 19 bp, Homo sapiens
ttgccattttgtagtgcca

SEQ ID NO: 3805 - DNA, 19 bp, Homo sapiens
tttgccattttgtagtgcc

SEQ ID NO: 3806 - DNA, 19 bp, Homo sapiens
gtttgccattttgtagtgc

SEQ ID NO: 3807 - DNA, 19 bp, Homo sapiens
tgtttgccattttgtagtg

SEQ ID NO: 3808 - DNA, 19 bp, Homo sapiens
ctgtttgccattttgtagt

SEQ ID NO: 3809 - DNA, 19 bp, Homo sapiens
actgtttgccattttgtag

SEQ ID NO: 3810 - DNA, 19 bp, Homo sapiens
gactgtttgccattttgta

SEQ ID NO: 3811 - DNA, 19 bp, Homo sapiens
tgactgtttgccattttgt

SEQ ID NO: 3812 - DNA, 19 bp, Homo sapiens
ctgactgtttgccattttg

SEQ ID NO: 3813 - DNA, 19 bp, Homo sapiens
tctgactgtttgccatttt

SEQ ID NO: 3814 - DNA, 19 bp, Homo sapiens
ttctgactgtttgccattt

SEQ ID NO: 3815 - DNA, 19 bp, Homo sapiens
cttctgactgtttgccatt

SEQ ID NO: 3816 - DNA, 19 bp, Homo sapiens
tcttctgactgtttgccat

SEQ ID NO: 3817 - DNA, 19 bp, Homo sapiens
gtcttctgactgtttgcca

SEQ ID NO: 3818 - DNA, 19 bp, Homo sapiens
tgtcttctgactgtttgcc

SEQ ID NO: 3819 - DNA, 19 bp, Homo sapiens
ttgtcttctgactgtttgc

SEQ ID NO: 3820 - DNA, 19 bp, Homo sapiens
tttgtcttctgactgtttg

SEQ ID NO: 3821 - DNA, 19 bp, Homo sapiens
ttttgtcttctgactgttt

SEQ ID NO: 3822 - DNA, 19 bp, Homo sapiens
cttttgtcttctgactgtt

SEQ ID NO: 3823 - DNA, 19 bp, Homo sapiens
gcttttgtcttctgactgt

SEQ ID NO: 3824 - DNA, 19 bp, Homo sapiens
cgcttttgtcttctgactg

SEQ ID NO: 3825 - DNA, 19 bp, Homo sapiens
ccgcttttgtcttctgact

SEQ ID NO: 3826 - DNA, 19 bp, Homo sapiens
cccgcttttgtcttctgac

SEQ ID NO: 3827 - DNA, 19 bp, Homo sapiens
tcccgcttttgtcttctga

SEQ ID NO: 3828 - DNA, 19 bp, Homo sapiens
ctcccgcttttgtcttctg

SEQ ID NO: 3829 - DNA, 19 bp, Homo sapiens
actcccgcttttgtcttct

SEQ ID NO: 3830 - DNA, 19 bp, Homo sapiens
cactcccgcttttgtcttc

SEQ ID NO: 3831 - DNA, 19 bp, Homo sapiens
ccactcccgcttttgtctt

SEQ ID NO: 3832 - DNA, 19 bp, Homo sapiens
tccactcccgcttttgtct

SEQ ID NO: 3833 - DNA, 19 bp, Homo sapiens
atccactcccgcttttgtc

SEQ ID NO: 3834 - DNA, 19 bp, Homo sapiens
gatccactcccgcttttgt

SEQ ID NO: 3835 - DNA, 19 bp, Homo sapiens
tgatccactcccgcttttg

SEQ ID NO: 3836 - DNA, 19 bp, Homo sapiens
ttgatccactcccgctttt

SEQ ID NO: 3837 - DNA, 19 bp, Homo sapiens
cttgatccactcccgcttt

SEQ ID NO: 3838 - DNA, 19 bp, Homo sapiens
acttgatccactcccgctt

SEQ ID NO: 3839 - DNA, 19 bp, Homo sapiens
aacttgatccactcccgct

SEQ ID NO: 3840 - DNA, 19 bp, Homo sapiens
aaacttgatccactcccgc

SEQ ID NO: 3841 - DNA, 19 bp, Homo sapiens
caaacttgatccactcccg

SEQ ID NO: 3842 - DNA, 19 bp, Homo sapiens
gcaaacttgatccactccc

SEQ ID NO: 3843 - DNA, 19 bp, Homo sapiens
ggcaaacttgatccactcc

SEQ ID NO: 3844 - DNA, 19 bp, Homo sapiens
cggcaaacttgatccactc

SEQ ID NO: 3845 - DNA, 19 bp, Homo sapiens
gcggcaaacttgatccact

SEQ ID NO: 3846 - DNA, 19 bp, Homo sapiens
tgcggcaaacttgatccac

SEQ ID NO: 3847 - DNA, 19 bp, Homo sapiens
ctgcggcaaacttgatcca

SEQ ID NO: 3848 - DNA, 19 bp, Homo sapiens
gctgcggcaaacttgatcc

SEQ ID NO: 3849 - DNA, 19 bp, Homo sapiens
ggctgcggcaaacttgatc

SEQ ID NO: 3850 - DNA, 19 bp, Homo sapiens
aggctgcggcaaacttgat

SEQ ID NO: 3851 - DNA, 19 bp, Homo sapiens
caggctgcggcaaacttga

SEQ ID NO: 3852 - DNA, 19 bp, Homo sapiens
acaggctgcggcaaacttg

SEQ ID NO: 3853 - DNA, 19 bp, Homo sapiens
gacaggctgcggcaaactt

SEQ ID NO: 3854 - DNA, 19 bp, Homo sapiens
cgacaggctgcggcaaact

SEQ ID NO: 3855 - DNA, 19 bp, Homo sapiens
tcgacaggctgcggcaaac

SEQ ID NO: 3856 - DNA, 19 bp, Homo sapiens
ctcgacaggctgcggcaaa

SEQ ID NO: 3857 - DNA, 19 bp, Homo sapiens
tctcgacaggctgcggcaa

SEQ ID NO: 3858 - DNA, 19 bp, Homo sapiens
ttctcgacaggctgcggca

SEQ ID NO: 3859 - DNA, 19 bp, Homo sapiens
cttctcgacaggctgcggc

SEQ ID NO: 3860 - DNA, 19 bp, Homo sapiens
ccttctcgacaggctgcgg

SEQ ID NO: 3861 - DNA, 19 bp, Homo sapiens
tccttctcgacaggctgcg

SEQ ID NO: 3862 - DNA, 19 bp, Homo sapiens
ctccttctcgacaggctgc

SEQ ID NO: 3863 - DNA, 19 bp, Homo sapiens
tctccttctcgacaggctg

SEQ ID NO: 3864 - DNA, 19 bp, Homo sapiens
ctctccttctcgacaggct

SEQ ID NO: 3865 - DNA, 19 bp, Homo sapiens
cctctccttctcgacaggc

SEQ ID NO: 3866 - DNA, 19 bp, Homo sapiens
tcctctccttctcgacagg

SEQ ID NO: 3867 - DNA, 19 bp, Homo sapiens
gtcctctccttctcgacag

SEQ ID NO: 3868 - DNA, 19 bp, Homo sapiens
tgtcctctccttctcgaca

SEQ ID NO: 3869 - DNA, 19 bp, Homo sapiens
ttgtcctctccttctcgac

SEQ ID NO: 3870 - DNA, 19 bp, Homo sapiens
gttgtcctctccttctcga

SEQ ID NO: 3871 - DNA, 19 bp, Homo sapiens
agttgtcctctccttctcg

SEQ ID NO: 3872 - DNA, 19 bp, Homo sapiens
gagttgtcctctccttctc

SEQ ID NO: 3873 - DNA, 19 bp, Homo sapiens
cgagttgtcctctccttct

SEQ ID NO: 3874 - DNA, 19 bp, Homo sapiens
tcgagttgtcctctccttc

SEQ ID NO: 3875 - DNA, 19 bp, Homo sapiens
ttcgagttgtcctctcctt

SEQ ID NO: 3876 - DNA, 19 bp, Homo sapiens
cttcgagttgtcctctcct

SEQ ID NO: 3877 - DNA, 19 bp, Homo sapiens
tcttcgagttgtcctctcc

SEQ ID NO: 3878 - DNA, 19 bp, Homo sapiens
ctcttcgagttgtcctctc

SEQ ID NO: 3879 - DNA, 19 bp, Homo sapiens
cctcttcgagttgtcctct

SEQ ID NO: 3880 - DNA, 19 bp, Homo sapiens
tcctcttcgagttgtcctc

SEQ ID NO: 3881 - DNA, 19 bp, Homo sapiens
ttcctcttcgagttgtcct

SEQ ID NO: 3882 - DNA, 19 bp, Homo sapiens
gttcctcttcgagttgtcc

SEQ ID NO: 3883 - DNA, 19 bp, Homo sapiens
ggttcctcttcgagttgtc

SEQ ID NO: 3884 - DNA, 19 bp, Homo sapiens
gggttcctcttcgagttgt

SEQ ID NO: 3885 - DNA, 19 bp, Homo sapiens
ggggttcctcttcgagttg

SEQ ID NO: 3886 - DNA, 19 bp, Homo sapiens
tggggttcctcttcgagtt

SEQ ID NO: 3887 - DNA, 19 bp, Homo sapiens
atggggttcctcttcgagt

SEQ ID NO: 3888 - DNA, 19 bp, Homo sapiens
aatggggttcctcttcgag

SEQ ID NO: 3889 - DNA, 19 bp, Homo sapiens
caatggggttcctcttcga

SEQ ID NO: 3890 - DNA, 19 bp, Homo sapiens
gcaatggggttcctcttcg

SEQ ID NO: 3891 - DNA, 19 bp, Homo sapiens
ggcaatggggttcctcttc

SEQ ID NO: 3892 - DNA, 19 bp, Homo sapiens
tggcaatggggttcctctt

SEQ ID NO: 3893 - DNA, 19 bp, Homo sapiens
ttggcaatggggttcctct

SEQ ID NO: 3894 - DNA, 19 bp, Homo sapiens
tttggcaatggggttcctc

SEQ ID NO: 3895 - DNA, 19 bp, Homo sapiens
ttttggcaatggggttcct

SEQ ID NO: 3896 - DNA, 19 bp, Homo sapiens
attttggcaatggggttcc

SEQ ID NO: 3897 - DNA, 19 bp, Homo sapiens
aattttggcaatggggttc

SEQ ID NO: 3898 - DNA, 19 bp, Homo sapiens
gaattttggcaatggggtt

SEQ ID NO: 3899 - DNA, 19 bp, Homo sapiens
cgaattttggcaatggggt

SEQ ID NO: 3900 - DNA, 19 bp, Homo sapiens
tcgaattttggcaatgggg

SEQ ID NO: 3901 - DNA, 19 bp, Homo sapiens
atcgaattttggcaatggg

SEQ ID NO: 3902 - DNA, 19 bp, Homo sapiens
gatcgaattttggcaatgg

SEQ ID NO: 3903 - DNA, 19 bp, Homo sapiens
tgatcgaattttggcaatg

SEQ ID NO: 3904 - DNA, 19 bp, Homo sapiens
ctgatcgaattttggcaat

SEQ ID NO: 3905 - DNA, 19 bp, Homo sapiens
tctgatcgaattttggcaa

SEQ ID NO: 3906 - DNA, 19 bp, Homo sapiens
gtctgatcgaattttggca

SEQ ID NO: 3907 - DNA, 19 bp, Homo sapiens
agtctgatcgaattttggc

SEQ ID NO: 3908 - DNA, 19 bp, Homo sapiens
cagtctgatcgaattttgg

SEQ ID NO: 3909 - DNA, 19 bp, Homo sapiens
gcagtctgatcgaattttg

SEQ ID NO: 3910 - DNA, 19 bp, Homo sapiens
cgcagtctgatcgaatttt

SEQ ID NO: 3911 - DNA, 19 bp, Homo sapiens
tcgcagtctgatcgaattt

SEQ ID NO: 3912 - DNA, 19 bp, Homo sapiens
ttcgcagtctgatcgaatt

SEQ ID NO: 3913 - DNA, 19 bp, Homo sapiens
attcgcagtctgatcgaat

SEQ ID NO: 3914 - DNA, 19 bp, Homo sapiens
gattcgcagtctgatcgaa

SEQ ID NO: 3915 - DNA, 19 bp, Homo sapiens
cgattcgcagtctgatcga

SEQ ID NO: 3916 - DNA, 19 bp, Homo sapiens
tcgattcgcagtctgatcg

SEQ ID NO: 3917 - DNA, 19 bp, Homo sapiens
ttcgattcgcagtctgatc

SEQ ID NO: 3918 - DNA, 19 bp, Homo sapiens
gttcgattcgcagtctgat

SEQ ID NO: 3919 - DNA, 19 bp, Homo sapiens
ggttcgattcgcagtctga

SEQ ID NO: 3920 - DNA, 19 bp, Homo sapiens
tggttcgattcgcagtctg

SEQ ID NO: 3921 - DNA, 19 bp, Homo sapiens
ctggttcgattcgcagtct

SEQ ID NO: 3922 - DNA, 19 bp, Homo sapiens
tctggttcgattcgcagtc

SEQ ID NO: 3923 - DNA, 19 bp, Homo sapiens
ttctggttcgattcgcagt

SEQ ID NO: 3924 - DNA, 19 bp, Homo sapiens
cttctggttcgattcgcag

SEQ ID NO: 3925 - DNA, 19 bp, Homo sapiens
tcttctggttcgattcgca

SEQ ID NO: 3926 - DNA, 19 bp, Homo sapiens
atcttctggttcgattcgc

SEQ ID NO: 3927 - DNA, 19 bp, Homo sapiens
tatcttctggttcgattcg

SEQ ID NO: 3928 - DNA, 19 bp, Homo sapiens
ttatcttctggttcgattc

SEQ ID NO: 3929 - DNA, 19 bp, Homo sapiens
gttatcttctggttcgatt

SEQ ID NO: 3930 - DNA, 19 bp, Homo sapiens
tgttatcttctggttcgat

SEQ ID NO: 3931 - DNA, 19 bp, Homo sapiens
atgttatcttctggttcga

SEQ ID NO: 3932 - DNA, 19 bp, Homo sapiens
tatgttatcttctggttcg

SEQ ID NO: 3933 - DNA, 19 bp, Homo sapiens
gtatgttatcttctggttc

SEQ ID NO: 3934 - DNA, 19 bp, Homo sapiens
ggtatgttatcttctggtt

SEQ ID NO: 3935 - DNA, 19 bp, Homo sapiens
cggtatgttatcttctggt

SEQ ID NO: 3936 - DNA, 19 bp, Homo sapiens
ccggtatgttatcttctgg

SEQ ID NO: 3937 - DNA, 19 bp, Homo sapiens
tccggtatgttatcttctg

SEQ ID NO: 3938 - DNA, 19 bp, Homo sapiens
atccggtatgttatcttct

SEQ ID NO: 3939 - DNA, 19 bp, Homo sapiens
aatccggtatgttatcttc

SEQ ID NO: 3940 - DNA, 19 bp, Homo sapiens
aaatccggtatgttatctt

SEQ ID NO: 3941 - DNA, 19 bp, Homo sapiens
gaaatccggtatgttatct

SEQ ID NO: 3942 - DNA, 19 bp, Homo sapiens
agaaatccggtatgttatc

SEQ ID NO: 3943 - DNA, 19 bp, Homo sapiens
cagaaatccggtatgttat

SEQ ID NO: 3944 - DNA, 19 bp, Homo sapiens
ccagaaatccggtatgtta

SEQ ID NO: 3945 - DNA, 19 bp, Homo sapiens
tccagaaatccggtatgtt

SEQ ID NO: 3946 - DNA, 19 bp, Homo sapiens
ctccagaaatccggtatgt

SEQ ID NO: 3947 - DNA, 19 bp, Homo sapiens
actccagaaatccggtatg

SEQ ID NO: 3948 - DNA, 19 bp, Homo sapiens
tactccagaaatccggtat

SEQ ID NO: 3949 - DNA, 19 bp, Homo sapiens
ctactccagaaatccggta

SEQ ID NO: 3950 - DNA, 19 bp, Homo sapiens
cctactccagaaatccggt

SEQ ID NO: 3951 - DNA, 19 bp, Homo sapiens
ccctactccagaaatccgg

SEQ ID NO: 3952 - DNA, 19 bp, Homo sapiens
tccctactccagaaatccg

SEQ ID NO: 3953 - DNA, 19 bp, Homo sapiens
atccctactccagaaatcc

SEQ ID NO: 3954 - DNA, 19 bp, Homo sapiens
aatccctactccagaaatc

SEQ ID NO: 3955 - DNA, 19 bp, Homo sapiens
caatccctactccagaaat

SEQ ID NO: 3956 - DNA, 19 bp, Homo sapiens
tcaatccctactccagaaa

SEQ ID NO: 3957 - DNA, 19 bp, Homo sapiens
atcaatccctactccagaa

SEQ ID NO: 3958 - DNA, 19 bp, Homo sapiens
gatcaatccctactccaga

SEQ ID NO: 3959 - DNA, 19 bp, Homo sapiens
cgatcaatccctactccag

SEQ ID NO: 3960 - DNA, 19 bp, Homo sapiens
tcgatcaatccctactcca

SEQ ID NO: 3961 - DNA, 19 bp, Homo sapiens
gtcgatcaatccctactcc

SEQ ID NO: 3962 - DNA, 19 bp, Homo sapiens
ggtcgatcaatccctactc

SEQ ID NO: 3963 - DNA, 19 bp, Homo sapiens
tggtcgatcaatccctact

SEQ ID NO: 3964 - DNA, 19 bp, Homo sapiens
gtggtcgatcaatccctac

SEQ ID NO: 3965 - DNA, 19 bp, Homo sapiens
ggtggtcgatcaatcccta

SEQ ID NO: 3966 - DNA, 19 bp, Homo sapiens
tggtggtcgatcaatccct

SEQ ID NO: 3967 - DNA, 19 bp, Homo sapiens
atggtggtcgatcaatccc

SEQ ID NO: 3968 - DNA, 19 bp, Homo sapiens
tatggtggtcgatcaatcc

SEQ ID NO: 3969 - DNA, 19 bp, Homo sapiens
atatggtggtcgatcaatc

SEQ ID NO: 3970 - DNA, 19 bp, Homo sapiens
catatggtggtcgatcaat

SEQ ID NO: 3971 - DNA, 19 bp, Homo sapiens
ccatatggtggtcgatcaa

SEQ ID NO: 3972 - DNA, 19 bp, Homo sapiens
cccatatggtggtcgatca

SEQ ID NO: 3973 - DNA, 19 bp, Homo sapiens
ccccatatggtggtcgatc

SEQ ID NO: 3974 - DNA, 19 bp, Homo sapiens
accccatatggtggtcgat

SEQ ID NO: 3975 - DNA, 19 bp, Homo sapiens
taccccatatggtggtcga

SEQ ID NO: 3976 - DNA, 19 bp, Homo sapiens
ataccccatatggtggtcg

SEQ ID NO: 3977 - DNA, 19 bp, Homo sapiens
aataccccatatggtggtc

SEQ ID NO: 3978 - DNA, 19 bp, Homo sapiens
gaataccccatatggtggt

SEQ ID NO: 3979 - DNA, 19 bp, Homo sapiens
tgaataccccatatggtgg

SEQ ID NO: 3980 - DNA, 19 bp, Homo sapiens
gtgaataccccatatggtg

SEQ ID NO: 3981 - DNA, 19 bp, Homo sapiens
ggtgaataccccatatggt

SEQ ID NO: 3982 - DNA, 19 bp, Homo sapiens
tggtgaataccccatatgg

SEQ ID NO: 3983 - DNA, 19 bp, Homo sapiens
atggtgaataccccatatg

SEQ ID NO: 3984 - DNA, 19 bp, Homo sapiens
aatggtgaataccccatat

SEQ ID NO: 3985 - DNA, 19 bp, Homo sapiens
taatggtgaataccccata

SEQ ID NO: 3986 - DNA, 19 bp, Homo sapiens
ttaatggtgaataccccat

SEQ ID NO: 3987 - DNA, 19 bp, Homo sapiens
attaatggtgaatacccca

SEQ ID NO: 3988 - DNA, 19 bp, Homo sapiens
gattaatggtgaatacccc

SEQ ID NO: 3989 - DNA, 19 bp, Homo sapiens
ggattaatggtgaataccc

SEQ ID NO: 3990 - DNA, 19 bp, Homo sapiens
aggattaatggtgaatacc

SEQ ID NO: 3991 - DNA, 19 bp, Homo sapiens
gaggattaatggtgaatac

SEQ ID NO: 3992 - DNA, 19 bp, Homo sapiens
cgaggattaatggtgaata

SEQ ID NO: 3993 - DNA, 19 bp, Homo sapiens
gcgaggattaatggtgaat

SEQ ID NO: 3994 - DNA, 19 bp, Homo sapiens
tgcgaggattaatggtgaa

SEQ ID NO: 3995 - DNA, 19 bp, Homo sapiens
gtgcgaggattaatggtga

SEQ ID NO: 3996 - DNA, 19 bp, Homo sapiens
agtgcgaggattaatggtg

SEQ ID NO: 3997 - DNA, 19 bp, Homo sapiens
cagtgcgaggattaatggt

SEQ ID NO: 3998 - DNA, 19 bp, Homo sapiens
ccagtgcgaggattaatgg

SEQ ID NO: 3999 - DNA, 19 bp, Homo sapiens
cccagtgcgaggattaatg

SEQ ID NO: 4000 - DNA, 19 bp, Homo sapiens
ccccagtgcgaggattaat

SEQ ID NO: 4001 - DNA, 19 bp, Homo sapiens
tccccagtgcgaggattaa

SEQ ID NO: 4002 - DNA, 19 bp, Homo sapiens
ttccccagtgcgaggatta

SEQ ID NO: 4003 - DNA, 19 bp, Homo sapiens
tttccccagtgcgaggatt

SEQ ID NO: 4004 - DNA, 19 bp, Homo sapiens
atttccccagtgcgaggat

SEQ ID NO: 4005 - DNA, 19 bp, Homo sapiens
aatttccccagtgcgagga

SEQ ID NO: 4006 - DNA, 19 bp, Homo sapiens
taatttccccagtgcgagg

SEQ ID NO: 4007 - DNA, 19 bp, Homo sapiens
ttaatttccccagtgcgag

SEQ ID NO: 4008 - DNA, 19 bp, Homo sapiens
gttaatttccccagtgcga

SEQ ID NO: 4009 - DNA, 19 bp, Homo sapiens
tgttaatttccccagtgcg

SEQ ID NO: 4010 - DNA, 19 bp, Homo sapiens
atgttaatttccccagtgc

SEQ ID NO: 4011 - DNA, 19 bp, Homo sapiens
gatgttaatttccccagtg

SEQ ID NO: 4012 - DNA, 19 bp, Homo sapiens
tgatgttaatttccccagt

SEQ ID NO: 4013 - DNA, 19 bp, Homo sapiens
gtgatgttaatttccccag

SEQ ID NO: 4014 - DNA, 19 bp, Homo sapiens
agtgatgttaatttcccca

SEQ ID NO: 4015 - DNA, 19 bp, Homo sapiens
aagtgatgttaatttcccc

SEQ ID NO: 4016 - DNA, 19 bp, Homo sapiens
gaagtgatgttaatttccc

SEQ ID NO: 4017 - DNA, 19 bp, Homo sapiens
tgaagtgatgttaatttcc

SEQ ID NO: 4018 - DNA, 19 bp, Homo sapiens
ctgaagtgatgttaatttc

SEQ ID NO: 4019 - DNA, 19 bp, Homo sapiens
actgaagtgatgttaattt

SEQ ID NO: 4020 - DNA, 19 bp, Homo sapiens
cactgaagtgatgttaatt

SEQ ID NO: 4021 - DNA, 19 bp, Homo sapiens
ccactgaagtgatgttaat

SEQ ID NO: 4022 - DNA, 19 bp, Homo sapiens
accactgaagtgatgttaa

SEQ ID NO: 4023 - DNA, 19 bp, Homo sapiens
taccactgaagtgatgtta

SEQ ID NO: 4024 - DNA, 19 bp, Homo sapiens
ctaccactgaagtgatgtt

SEQ ID NO: 4025 - DNA, 19 bp, Homo sapiens
tctaccactgaagtgatgt

SEQ ID NO: 4026 - DNA, 19 bp, Homo sapiens
gtctaccactgaagtgatg

SEQ ID NO: 4027 - DNA, 19 bp, Homo sapiens
tgtctaccactgaagtgat

SEQ ID NO: 4028 - DNA, 19 bp, Homo sapiens
ctgtctaccactgaagtga

SEQ ID NO: 4029 - DNA, 19 bp, Homo sapiens
tctgtctaccactgaagtg

SEQ ID NO: 4030 - DNA, 19 bp, Homo sapiens
ctctgtctaccactgaagt

SEQ ID NO: 4031 - DNA, 19 bp, Homo sapiens
tctctgtctaccactgaag

SEQ ID NO: 4032 - DNA, 19 bp, Homo sapiens
ttctctgtctaccactgaa

SEQ ID NO: 4033 - DNA, 19 bp, Homo sapiens
tttctctgtctaccactga

SEQ ID NO: 4034 - DNA, 19 bp, Homo sapiens
atttctctgtctaccactg

SEQ ID NO: 4035 - DNA, 19 bp, Homo sapiens
tatttctctgtctaccact

SEQ ID NO: 4036 - DNA, 19 bp, Homo sapiens
ttatttctctgtctaccac

SEQ ID NO: 4037 - DNA, 19 bp, Homo sapiens
gttatttctctgtctacca

SEQ ID NO: 4038 - DNA, 19 bp, Homo sapiens
agttatttctctgtctacc

SEQ ID NO: 4039 - DNA, 19 bp, Homo sapiens
gagttatttctctgtctac

SEQ ID NO: 4040 - DNA, 19 bp, Homo sapiens
ggagttatttctctgtcta

SEQ ID NO: 4041 - DNA, 19 bp, Homo sapiens
tggagttatttctctgtct

SEQ ID NO: 4042 - DNA, 19 bp, Homo sapiens
gtggagttatttctctgtc

SEQ ID NO: 4043 - DNA, 19 bp, Homo sapiens
agtggagttatttctctgt

SEQ ID NO: 4044 - DNA, 19 bp, Homo sapiens
aagtggagttatttctctg

SEQ ID NO: 4045 - DNA, 19 bp, Homo sapiens
aaagtggagttatttctct

SEQ ID NO: 4046 - DNA, 19 bp, Homo sapiens
aaaagtggagttatttctc

SEQ ID NO: 4047 - DNA, 19 bp, Homo sapiens
gaaaagtggagttatttct

SEQ ID NO: 4048 - DNA, 19 bp, Homo sapiens
agaaaagtggagttatttc

SEQ ID NO: 4049 - DNA, 19 bp, Homo sapiens
aagaaaagtggagttattt

SEQ ID NO: 4050 - DNA, 19 bp, Homo sapiens
caagaaaagtggagttatt

SEQ ID NO: 4051 - DNA, 19 bp, Homo sapiens
tcaagaaaagtggagttat

SEQ ID NO: 4052 - DNA, 19 bp, Homo sapiens
atcaagaaaagtggagtta

SEQ ID NO: 4053 - DNA, 19 bp, Homo sapiens
gatcaagaaaagtggagtt

SEQ ID NO: 4054 - DNA, 19 bp, Homo sapiens
agatcaagaaaagtggagt

SEQ ID NO: 4055 - DNA, 19 bp, Homo sapiens
tagatcaagaaaagtggag

SEQ ID NO: 4056 - DNA, 19 bp, Homo sapiens
atagatcaagaaaagtgga

SEQ ID NO: 4057 - DNA, 19 bp, Homo sapiens
aatagatcaagaaaagtgg

SEQ ID NO: 4058 - DNA, 19 bp, Homo sapiens
caatagatcaagaaaagtg

SEQ ID NO: 4059 - DNA, 19 bp, Homo sapiens
gcaatagatcaagaaaagt

SEQ ID NO: 4060 - DNA, 19 bp, Homo sapiens
ggcaatagatcaagaaaag

SEQ ID NO: 4061 - DNA, 19 bp, Homo sapiens
cggcaatagatcaagaaaa

SEQ ID NO: 4062 - DNA, 19 bp, Homo sapiens
ccggcaatagatcaagaaa

SEQ ID NO: 4063 - DNA, 19 bp, Homo sapiens
cccggcaatagatcaagaa

SEQ ID NO: 4064 - DNA, 19 bp, Homo sapiens
gcccggcaatagatcaaga

SEQ ID NO: 4065 - DNA, 19 bp, Homo sapiens
agcccggcaatagatcaag

SEQ ID NO: 4066 - DNA, 19 bp, Homo sapiens
gagcccggcaatagatcaa

SEQ ID NO: 4067 - DNA, 19 bp, Homo sapiens
agagcccggcaatagatca

SEQ ID NO: 4068 - DNA, 19 bp, Homo sapiens
cagagcccggcaatagatc

SEQ ID NO: 4069 - DNA, 19 bp, Homo sapiens
tcagagcccggcaatagat

SEQ ID NO: 4070 - DNA, 19 bp, Homo sapiens
ttcagagcccggcaataga

SEQ ID NO: 4071 - DNA, 19 bp, Homo sapiens
attcagagcccggcaatag

SEQ ID NO: 4072 - DNA, 19 bp, Homo sapiens
aattcagagcccggcaata

SEQ ID NO: 4073 - DNA, 19 bp, Homo sapiens
gaattcagagcccggcaat

SEQ ID NO: 4074 - DNA, 19 bp, Homo sapiens
tgaattcagagcccggcaa

SEQ ID NO: 4075 - DNA, 19 bp, Homo sapiens
gtgaattcagagcccggca

SEQ ID NO: 4076 - DNA, 19 bp, Homo sapiens
cgtgaattcagagcccggc

SEQ ID NO: 4077 - DNA, 19 bp, Homo sapiens
ccgtgaattcagagcccgg

SEQ ID NO: 4078 - DNA, 19 bp, Homo sapiens
cccgtgaattcagagcccg

SEQ ID NO: 4079 - DNA, 19 bp, Homo sapiens
ccccgtgaattcagagccc

SEQ ID NO: 4080 - DNA, 19 bp, Homo sapiens
accccgtgaattcagagcc

SEQ ID NO: 4081 - DNA, 19 bp, Homo sapiens
caccccgtgaattcagagc

SEQ ID NO: 4082 - DNA, 19 bp, Homo sapiens
tcaccccgtgaattcagag

SEQ ID NO: 4083 - DNA, 19 bp, Homo sapiens
ttcaccccgtgaattcaga

SEQ ID NO: 4084 - DNA, 19 bp, Homo sapiens
cttcaccccgtgaattcag

SEQ ID NO: 4085 - DNA, 19 bp, Homo sapiens
tcttcaccccgtgaattca

SEQ ID NO: 4086 - DNA, 19 bp, Homo sapiens
atcttcaccccgtgaattc

SEQ ID NO: 4087 - DNA, 19 bp, Homo sapiens
aatcttcaccccgtgaatt

SEQ ID NO: 4088 - DNA, 19 bp, Homo sapiens
aaatcttcaccccgtgaat

SEQ ID NO: 4089 - DNA, 19 bp, Homo sapiens
taaatcttcaccccgtgaa

SEQ ID NO: 4090 - DNA, 19 bp, Homo sapiens
ctaaatcttcaccccgtga

SEQ ID NO: 4091 - DNA, 19 bp, Homo sapiens
tctaaatcttcaccccgtg

SEQ ID NO: 4092 - DNA, 19 bp, Homo sapiens
ttctaaatcttcaccccgt

SEQ ID NO: 4093 - DNA, 19 bp, Homo sapiens
tttctaaatcttcaccccg

SEQ ID NO: 4094 - DNA, 19 bp, Homo sapiens
ctttctaaatcttcacccc

SEQ ID NO: 4095 - DNA, 19 bp, Homo sapiens
cctttctaaatcttcaccc

SEQ ID NO: 4096 - DNA, 19 bp, Homo sapiens
gcctttctaaatcttcacc

SEQ ID NO: 4097 - DNA, 19 bp, Homo sapiens
ggcctttctaaatcttcac

SEQ ID NO: 4098 - DNA, 19 bp, Homo sapiens
aggcctttctaaatcttca

SEQ ID NO: 4099 - DNA, 19 bp, Homo sapiens
gaggcctttctaaatcttc

SEQ ID NO: 4100 - DNA, 19 bp, Homo sapiens
agaggcctttctaaatctt

SEQ ID NO: 4101 - DNA, 19 bp, Homo sapiens
aagaggcctttctaaatct

SEQ ID NO: 4102 - DNA, 19 bp, Homo sapiens
caagaggcctttctaaatc

SEQ ID NO: 4103 - DNA, 19 bp, Homo sapiens
tcaagaggcctttctaaat

SEQ ID NO: 4104 - DNA, 19 bp, Homo sapiens
ctcaagaggcctttctaaa

SEQ ID NO: 4105 - DNA, 19 bp, Homo sapiens
gctcaagaggcctttctaa

SEQ ID NO: 4106 - DNA, 19 bp, Homo sapiens
agctcaagaggcctttcta

SEQ ID NO: 4107 - DNA, 19 bp, Homo sapiens
aagctcaagaggcctttct

SEQ ID NO: 4108 - DNA, 19 bp, Homo sapiens
taagctcaagaggcctttc

SEQ ID NO: 4109 - DNA, 19 bp, Homo sapiens
ctaagctcaagaggccttt

SEQ ID NO: 4110 - DNA, 19 bp, Homo sapiens
tctaagctcaagaggcctt

SEQ ID NO: 4111 - DNA, 19 bp, Homo sapiens
ctctaagctcaagaggcct

SEQ ID NO: 4112 - DNA, 19 bp, Homo sapiens
actctaagctcaagaggcc

SEQ ID NO: 4113 - DNA, 19 bp, Homo sapiens
gactctaagctcaagaggc

SEQ ID NO: 4114 - DNA, 19 bp, Homo sapiens
tgactctaagctcaagagg

SEQ ID NO: 4115 - DNA, 19 bp, Homo sapiens
ttgactctaagctcaagag

SEQ ID NO: 4116 - DNA, 19 bp, Homo sapiens
tttgactctaagctcaaga

SEQ ID NO: 4117 - DNA, 19 bp, Homo sapiens
ctttgactctaagctcaag

SEQ ID NO: 4118 - DNA, 19 bp, Homo sapiens
actttgactctaagctcaa

SEQ ID NO: 4119 - DNA, 19 bp, Homo sapiens
aactttgactctaagctca

SEQ ID NO: 4120 - DNA, 19 bp, Homo sapiens
taactttgactctaagctc

SEQ ID NO: 4121 - DNA, 19 bp, Homo sapiens
ataactttgactctaagct

SEQ ID NO: 4122 - DNA, 19 bp, Homo sapiens
cataactttgactctaagc

SEQ ID NO: 4123 - DNA, 19 bp, Homo sapiens
ccataactttgactctaag

SEQ ID NO: 4124 - DNA, 19 bp, Homo sapiens
tccataactttgactctaa

SEQ ID NO: 4125 - DNA, 19 bp, Homo sapiens
gtccataactttgactcta

SEQ ID NO: 4126 - DNA, 19 bp, Homo sapiens
tgtccataactttgactct

SEQ ID NO: 4127 - DNA, 19 bp, Homo sapiens
atgtccataactttgactc

SEQ ID NO: 4128 - DNA, 19 bp, Homo sapiens
tatgtccataactttgact

SEQ ID NO: 4129 - DNA, 19 bp, Homo sapiens
ttatgtccataactttgac

SEQ ID NO: 4130 - DNA, 19 bp, Homo sapiens
tttatgtccataactttga

SEQ ID NO: 4131 - DNA, 19 bp, Homo sapiens
atttatgtccataactttg

SEQ ID NO: 4132 - DNA, 19 bp, Homo sapiens
catttatgtccataacttt

SEQ ID NO: 4133 - DNA, 19 bp, Homo sapiens
tcatttatgtccataactt

SEQ ID NO: 4134 - DNA, 19 bp, Homo sapiens
atcatttatgtccataact

SEQ ID NO: 4135 - DNA, 19 bp, Homo sapiens
tatcatttatgtccataac

SEQ ID NO: 4136 - DNA, 19 bp, Homo sapiens
ttatcatttatgtccataa

SEQ ID NO: 4137 - DNA, 19 bp, Homo sapiens
gttatcatttatgtccata

SEQ ID NO: 4138 - DNA, 19 bp, Homo sapiens
cgttatcatttatgtccat

SEQ ID NO: 4139 - DNA, 19 bp, Homo sapiens
gcgttatcatttatgtcca

SEQ ID NO: 4140 - DNA, 19 bp, Homo sapiens
agcgttatcatttatgtcc

SEQ ID NO: 4141 - DNA, 19 bp, Homo sapiens
gagcgttatcatttatgtc

SEQ ID NO: 4142 - DNA, 19 bp, Homo sapiens
ggagcgttatcatttatgt

SEQ ID NO: 4143 - DNA, 19 bp, Homo sapiens
tggagcgttatcatttatg

SEQ ID NO: 4144 - DNA, 19 bp, Homo sapiens
ctggagcgttatcatttat

SEQ ID NO: 4145 - DNA, 19 bp, Homo sapiens
actggagcgttatcattta

SEQ ID NO: 4146 - DNA, 19 bp, Homo sapiens
gactggagcgttatcattt

SEQ ID NO: 4147 - DNA, 19 bp, Homo sapiens
agactggagcgttatcatt

SEQ ID NO: 4148 - DNA, 19 bp, Homo sapiens
aagactggagcgttatcat

SEQ ID NO: 4149 - DNA, 19 bp, Homo sapiens
aaagactggagcgttatca

SEQ ID NO: 4150 - DNA, 19 bp, Homo sapiens
aaaagactggagcgttatc

SEQ ID NO: 4151 - DNA, 19 bp, Homo sapiens
gaaaagactggagcgttat

SEQ ID NO: 4152 - DNA, 19 bp, Homo sapiens
cgaaaagactggagcgtta

SEQ ID NO: 4153 - DNA, 19 bp, Homo sapiens
gcgaaaagactggagcgtt

SEQ ID NO: 4154 - DNA, 19 bp, Homo sapiens
tgcgaaaagactggagcgt

SEQ ID NO: 4155 - DNA, 19 bp, Homo sapiens
ttgcgaaaagactggagcg

SEQ ID NO: 4156 - DNA, 19 bp, Homo sapiens
tttgcgaaaagactggagc

SEQ ID NO: 4157 - DNA, 19 bp, Homo sapiens
ctttgcgaaaagactggag

SEQ ID NO: 4158 - DNA, 19 bp, Homo sapiens
actttgcgaaaagactgga

SEQ ID NO: 4159 - DNA, 19 bp, Homo sapiens
cactttgcgaaaagactgg

SEQ ID NO: 4160 - DNA, 19 bp, Homo sapiens
acactttgcgaaaagactg

SEQ ID NO: 4161 - DNA, 19 bp, Homo sapiens
tacactttgcgaaaagact

SEQ ID NO: 4162 - DNA, 19 bp, Homo sapiens
atacactttgcgaaaagac

SEQ ID NO: 4163 - DNA, 19 bp, Homo sapiens
tatacactttgcgaaaaga

SEQ ID NO: 4164 - DNA, 19 bp, Homo sapiens
gtatacactttgcgaaaag

SEQ ID NO: 4165 - DNA, 19 bp, Homo sapiens
tgtatacactttgcgaaaa

SEQ ID NO: 4166 - DNA, 19 bp, Homo sapiens
gtgtatacactttgcgaaa

SEQ ID NO: 4167 - DNA, 19 bp, Homo sapiens
tgtgtatacactttgcgaa

SEQ ID NO: 4168 - DNA, 19 bp, Homo sapiens
ctgtgtatacactttgcga

SEQ ID NO: 4169 - DNA, 19 bp, Homo sapiens
gctgtgtatacactttgcg

SEQ ID NO: 4170 - DNA, 19 bp, Homo sapiens
ggctgtgtatacactttgc

SEQ ID NO: 4171 - DNA, 19 bp, Homo sapiens
tggctgtgtatacactttg

SEQ ID NO: 4172 - DNA, 19 bp, Homo sapiens
ctggctgtgtatacacttt

SEQ ID NO: 4173 - DNA, 19 bp, Homo sapiens
gctggctgtgtatacactt

SEQ ID NO: 4174 - DNA, 19 bp, Homo sapiens
tgctggctgtgtatacact

SEQ ID NO: 4175 - DNA, 19 bp, Homo sapiens
atgctggctgtgtatacac

SEQ ID NO: 4176 - DNA, 19 bp, Homo sapiens
aatgctggctgtgtataca

SEQ ID NO: 4177 - DNA, 19 bp, Homo sapiens
caatgctggctgtgtatac

SEQ ID NO: 4178 - DNA, 19 bp, Homo sapiens
tcaatgctggctgtgtata

SEQ ID NO: 4179 - DNA, 19 bp, Homo sapiens
ttcaatgctggctgtgtat

SEQ ID NO: 4180 - DNA, 19 bp, Homo sapiens
cttcaatgctggctgtgta

SEQ ID NO: 4181 - DNA, 19 bp, Homo sapiens
tcttcaatgctggctgtgt

SEQ ID NO: 4182 - DNA, 19 bp, Homo sapiens
ttcttcaatgctggctgtg

SEQ ID NO: 4183 - DNA, 19 bp, Homo sapiens
tttcttcaatgctggctgt

SEQ ID NO: 4184 - DNA, 19 bp, Homo sapiens
ttttcttcaatgctggctg

SEQ ID NO: 4185 - DNA, 19 bp, Homo sapiens
attttcttcaatgctggct

SEQ ID NO: 4186 - DNA, 19 bp, Homo sapiens
tattttcttcaatgctggc

SEQ ID NO: 4187 - DNA, 19 bp, Homo sapiens
ctattttcttcaatgctgg

SEQ ID NO: 4188 - DNA, 19 bp, Homo sapiens
actattttcttcaatgctg

SEQ ID NO: 4189 - DNA, 19 bp, Homo sapiens
cactattttcttcaatgct

SEQ ID NO: 4190 - DNA, 19 bp, Homo sapiens
tcactattttcttcaatgc

SEQ ID NO: 4191 - DNA, 19 bp, Homo sapiens
atcactattttcttcaatg

SEQ ID NO: 4192 - DNA, 19 bp, Homo sapiens
catcactattttcttcaat

SEQ ID NO: 4193 - DNA, 19 bp, Homo sapiens
gcatcactattttcttcaa

SEQ ID NO: 4194 - DNA, 19 bp, Homo sapiens
ggcatcactattttcttca

SEQ ID NO: 4195 - DNA, 19 bp, Homo sapiens
tggcatcactattttcttc

SEQ ID NO: 4196 - DNA, 19 bp, Homo sapiens
ttggcatcactattttctt

SEQ ID NO: 4197 - DNA, 19 bp, Homo sapiens
attggcatcactattttct

SEQ ID NO: 4198 - DNA, 19 bp, Homo sapiens
tattggcatcactattttc

SEQ ID NO: 4199 - DNA, 19 bp, Homo sapiens
gtattggcatcactatttt

SEQ ID NO: 4200 - DNA, 19 bp, Homo sapiens
tgtattggcatcactattt

SEQ ID NO: 4201 - DNA, 19 bp, Homo sapiens
atgtattggcatcactatt

SEQ ID NO: 4202 - DNA, 19 bp, Homo sapiens
aatgtattggcatcactat

SEQ ID NO: 4203 - DNA, 19 bp, Homo sapiens
caatgtattggcatcacta

SEQ ID NO: 4204 - DNA, 19 bp, Homo sapiens
ccaatgtattggcatcact

SEQ ID NO: 4205 - DNA, 19 bp, Homo sapiens
accaatgtattggcatcac

SEQ ID NO: 4206 - DNA, 19 bp, Homo sapiens
taccaatgtattggcatca

SEQ ID NO: 4207 - DNA, 19 bp, Homo sapiens
ctaccaatgtattggcatc

SEQ ID NO: 4208 - DNA, 19 bp, Homo sapiens
actaccaatgtattggcat

SEQ ID NO: 4209 - DNA, 19 bp, Homo sapiens
tactaccaatgtattggca

SEQ ID NO: 4210 - DNA, 19 bp, Homo sapiens
ttactaccaatgtattggc

SEQ ID NO: 4211 - DNA, 19 bp, Homo sapiens
tttactaccaatgtattgg

SEQ ID NO: 4212 - DNA, 19 bp, Homo sapiens
ctttactaccaatgtattg

SEQ ID NO: 4213 - DNA, 19 bp, Homo sapiens
actttactaccaatgtatt

SEQ ID NO: 4214 - DNA, 19 bp, Homo sapiens
aactttactaccaatgtat

SEQ ID NO: 4215 - DNA, 19 bp, Homo sapiens
taactttactaccaatgta

SEQ ID NO: 4216 - DNA, 19 bp, Homo sapiens
ataactttactaccaatgt

SEQ ID NO: 4217 - DNA, 19 bp, Homo sapiens
cataactttactaccaatg

SEQ ID NO: 4218 - DNA, 19 bp, Homo sapiens
acataactttactaccaat

SEQ ID NO: 4219 - DNA, 19 bp, Homo sapiens
cacataactttactaccaa

SEQ ID NO: 4220 - DNA, 19 bp, Homo sapiens
gcacataactttactacca

SEQ ID NO: 4221 - DNA, 19 bp, Homo sapiens
ggcacataactttactacc

SEQ ID NO: 4222 - DNA, 19 bp, Homo sapiens
tggcacataactttactac

SEQ ID NO: 4223 - DNA, 19 bp, Homo sapiens
gtggcacataactttacta

SEQ ID NO: 4224 - DNA, 19 bp, Homo sapiens
tgtggcacataactttact

SEQ ID NO: 4225 - DNA, 19 bp, Homo sapiens
ctgtggcacataactttac

SEQ ID NO: 4226 - DNA, 19 bp, Homo sapiens
tctgtggcacataacttta

SEQ ID NO: 4227 - DNA, 19 bp, Homo sapiens
atctgtggcacataacttt

SEQ ID NO: 4228 - DNA, 19 bp, Homo sapiens
catctgtggcacataactt

SEQ ID NO: 4229 - DNA, 19 bp, Homo sapiens
gcatctgtggcacataact

SEQ ID NO: 4230 - DNA, 19 bp, Homo sapiens
tgcatctgtggcacataac

SEQ ID NO: 4231 - DNA, 19 bp, Homo sapiens
ctgcatctgtggcacataa

SEQ ID NO: 4232 - DNA, 19 bp, Homo sapiens
tctgcatctgtggcacata

SEQ ID NO: 4233 - DNA, 19 bp, Homo sapiens
atctgcatctgtggcacat

SEQ ID NO: 4234 - DNA, 19 bp, Homo sapiens
catctgcatctgtggcaca

SEQ ID NO: 4235 - DNA, 19 bp, Homo sapiens
tcatctgcatctgtggcac

SEQ ID NO: 4236 - DNA, 19 bp, Homo sapiens
ttcatctgcatctgtggca

SEQ ID NO: 4237 - DNA, 19 bp, Homo sapiens
cttcatctgcatctgtggc

SEQ ID NO: 4238 - DNA, 19 bp, Homo sapiens
tcttcatctgcatctgtgg

SEQ ID NO: 4239 - DNA, 19 bp, Homo sapiens
ttcttcatctgcatctgtg

SEQ ID NO: 4240 - DNA, 19 bp, Homo sapiens
tttcttcatctgcatctgt

SEQ ID NO: 4241 - DNA, 19 bp, Homo sapiens
ttttcttcatctgcatctg

SEQ ID NO: 4242 - DNA, 19 bp, Homo sapiens
attttcttcatctgcatct

SEQ ID NO: 4243 - DNA, 19 bp, Homo sapiens
gattttcttcatctgcatc

SEQ ID NO: 4244 - DNA, 19 bp, Homo sapiens
tgattttcttcatctgcat

SEQ ID NO: 4245 - DNA, 19 bp, Homo sapiens
atgattttcttcatctgca

SEQ ID NO: 4246 - DNA, 19 bp, Homo sapiens
gatgattttcttcatctgc

SEQ ID NO: 4247 - DNA, 19 bp, Homo sapiens
agatgattttcttcatctg

SEQ ID NO: 4248 - DNA, 19 bp, Homo sapiens
cagatgattttcttcatct

SEQ ID NO: 4249 - DNA, 19 bp, Homo sapiens
tcagatgattttcttcatc

SEQ ID NO: 4250 - DNA, 19 bp, Homo sapiens
ttcagatgattttcttcat

SEQ ID NO: 4251 - DNA, 19 bp, Homo sapiens
attcagatgattttcttca

SEQ ID NO: 4252 - DNA, 19 bp, Homo sapiens
aattcagatgattttcttc

SEQ ID NO: 4253 - DNA, 19 bp, Homo sapiens
gaattcagatgattttctt

SEQ ID NO: 4254 - DNA, 19 bp, Homo sapiens
agaattcagatgattttct

SEQ ID NO: 4255 - DNA, 19 bp, Homo sapiens
tagaattcagatgattttc

SEQ ID NO: 4256 - DNA, 19 bp, Homo sapiens
ttagaattcagatgatttt

SEQ ID NO: 4257 - DNA, 19 bp, Homo sapiens
tttagaattcagatgattt

SEQ ID NO: 4258 - DNA, 19 bp, Homo sapiens
ttttagaattcagatgatt

SEQ ID NO: 4259 - DNA, 19 bp, Homo sapiens
attttagaattcagatgat

SEQ ID NO: 4260 - DNA, 19 bp, Homo sapiens
aattttagaattcagatga

SEQ ID NO: 4261 - DNA, 19 bp, Homo sapiens
caattttagaattcagatg

SEQ ID NO: 4262 - DNA, 19 bp, Homo sapiens
gcaattttagaattcagat

SEQ ID NO: 4263 - DNA, 19 bp, Homo sapiens
ggcaattttagaattcaga

SEQ ID NO: 4264 - DNA, 19 bp, Homo sapiens
aggcaattttagaattcag

SEQ ID NO: 4265 - DNA, 19 bp, Homo sapiens
taggcaattttagaattca

SEQ ID NO: 4266 - DNA, 19 bp, Homo sapiens
gtaggcaattttagaattc

SEQ ID NO: 4267 - DNA, 19 bp, Homo sapiens
tgtaggcaattttagaatt

SEQ ID NO: 4268 - DNA, 19 bp, Homo sapiens
ttgtaggcaattttagaat

SEQ ID NO: 4269 - DNA, 19 bp, Homo sapiens
cttgtaggcaattttagaa

SEQ ID NO: 4270 - DNA, 19 bp, Homo sapiens
tcttgtaggcaattttaga

SEQ ID NO: 4271 - DNA, 19 bp, Homo sapiens
atcttgtaggcaattttag

SEQ ID NO: 4272 - DNA, 19 bp, Homo sapiens
gatcttgtaggcaatttta

SEQ ID NO: 4273 - DNA, 19 bp, Homo sapiens
cgatcttgtaggcaatttt

SEQ ID NO: 4274 - DNA, 19 bp, Homo sapiens
acgatcttgtaggcaattt

SEQ ID NO: 4275 - DNA, 19 bp, Homo sapiens
gacgatcttgtaggcaatt

SEQ ID NO: 4276 - DNA, 19 bp, Homo sapiens
agacgatcttgtaggcaat

SEQ ID NO: 4277 - DNA, 19 bp, Homo sapiens
gagacgatcttgtaggcaa

SEQ ID NO: 4278 - DNA, 19 bp, Homo sapiens
agagacgatcttgtaggca

SEQ ID NO: 4279 - DNA, 19 bp, Homo sapiens
gagagacgatcttgtaggc

SEQ ID NO: 4280 - DNA, 19 bp, Homo sapiens
tgagagacgatcttgtagg

SEQ ID NO: 4281 - DNA, 19 bp, Homo sapiens
ctgagagacgatcttgtag

SEQ ID NO: 4282 - DNA, 19 bp, Homo sapiens
cctgagagacgatcttgta

SEQ ID NO: 4283 - DNA, 19 bp, Homo sapiens
tcctgagagacgatcttgt

SEQ ID NO: 4284 - DNA, 19 bp, Homo sapiens
ctcctgagagacgatcttg

SEQ ID NO: 4285 - DNA, 19 bp, Homo sapiens
gctcctgagagacgatctt

SEQ ID NO: 4286 - DNA, 19 bp, Homo sapiens
ggctcctgagagacgatct

SEQ ID NO: 4287 - DNA, 19 bp, Homo sapiens
tggctcctgagagacgatc

SEQ ID NO: 4288 - DNA, 19 bp, Homo sapiens
atggctcctgagagacgat

SEQ ID NO: 4289 - DNA, 19 bp, Homo sapiens
gatggctcctgagagacga

SEQ ID NO: 4290 - DNA, 19 bp, Homo sapiens
tgatggctcctgagagacg

SEQ ID NO: 4291 - DNA, 19 bp, Homo sapiens
ctgatggctcctgagagac

SEQ ID NO: 4292 - DNA, 19 bp, Homo sapiens
cctgatggctcctgagaga

SEQ ID NO: 4293 - DNA, 19 bp, Homo sapiens
acctgatggctcctgagag

SEQ ID NO: 4294 - DNA, 19 bp, Homo sapiens
cacctgatggctcctgaga

SEQ ID NO: 4295 - DNA, 19 bp, Homo sapiens
gcacctgatggctcctgag

SEQ ID NO: 4296 - DNA, 19 bp, Homo sapiens
tgcacctgatggctcctga

SEQ ID NO: 4297 - DNA, 19 bp, Homo sapiens
gtgcacctgatggctcctg

SEQ ID NO: 4298 - DNA, 19 bp, Homo sapiens
ggtgcacctgatggctcct

SEQ ID NO: 4299 - DNA, 19 bp, Homo sapiens
gggtgcacctgatggctcc

SEQ ID NO: 4300 - DNA, 19 bp, Homo sapiens
tgggtgcacctgatggctc

SEQ ID NO: 4301 - DNA, 19 bp, Homo sapiens
atgggtgcacctgatggct

SEQ ID NO: 4302 - DNA, 19 bp, Homo sapiens
catgggtgcacctgatggc

SEQ ID NO: 4303 - DNA, 19 bp, Homo sapiens
acatgggtgcacctgatgg

SEQ ID NO: 4304 - DNA, 19 bp, Homo sapiens
aacatgggtgcacctgatg

SEQ ID NO: 4305 - DNA, 19 bp, Homo sapiens
gaacatgggtgcacctgat

SEQ ID NO: 4306 - DNA, 19 bp, Homo sapiens
tgaacatgggtgcacctga

SEQ ID NO: 4307 - DNA, 19 bp, Homo sapiens
atgaacatgggtgcacctg

SEQ ID NO: 4308 - DNA, 19 bp, Homo sapiens
aatgaacatgggtgcacct

SEQ ID NO: 4309 - DNA, 19 bp, Homo sapiens
gaatgaacatgggtgcacc

SEQ ID NO: 4310 - DNA, 19 bp, Homo sapiens
agaatgaacatgggtgcac

SEQ ID NO: 4311 - DNA, 19 bp, Homo sapiens
cagaatgaacatgggtgca

SEQ ID NO: 4312 - DNA, 19 bp, Homo sapiens
tcagaatgaacatgggtgc

SEQ ID NO: 4313 - DNA, 19 bp, Homo sapiens
ttcagaatgaacatgggtg

SEQ ID NO: 4314 - DNA, 19 bp, Homo sapiens
attcagaatgaacatgggt

SEQ ID NO: 4315 - DNA, 19 bp, Homo sapiens
tattcagaatgaacatggg

SEQ ID NO: 4316 - DNA, 19 bp, Homo sapiens
ctattcagaatgaacatgg

SEQ ID NO: 4317 - DNA, 19 bp, Homo sapiens
cctattcagaatgaacatg

SEQ ID NO: 4318 - DNA, 19 bp, Homo sapiens
acctattcagaatgaacat

SEQ ID NO: 4319 - DNA, 19 bp, Homo sapiens
tacctattcagaatgaaca

SEQ ID NO: 4320 - DNA, 19 bp, Homo sapiens
gtacctattcagaatgaac

SEQ ID NO: 4321 - DNA, 19 bp, Homo sapiens
tgtacctattcagaatgaa

SEQ ID NO: 4322 - DNA, 19 bp, Homo sapiens
gtgtacctattcagaatga

SEQ ID NO: 4323 - DNA, 19 bp, Homo sapiens
agtgtacctattcagaatg

SEQ ID NO: 4324 - DNA, 19 bp, Homo sapiens
cagtgtacctattcagaat

SEQ ID NO: 4325 - DNA, 19 bp, Homo sapiens
ccagtgtacctattcagaa

SEQ ID NO: 4326 - DNA, 19 bp, Homo sapiens
tccagtgtacctattcaga

SEQ ID NO: 4327 - DNA, 19 bp, Homo sapiens
ctccagtgtacctattcag

SEQ ID NO: 4328 - DNA, 19 bp, Homo sapiens
tctccagtgtacctattca

SEQ ID NO: 4329 - DNA, 19 bp, Homo sapiens
ttctccagtgtacctattc

SEQ ID NO: 4330 - DNA, 19 bp, Homo sapiens
cttctccagtgtacctatt

SEQ ID NO: 4331 - DNA, 19 bp, Homo sapiens
acttctccagtgtacctat

SEQ ID NO: 4332 - DNA, 19 bp, Homo sapiens
gacttctccagtgtaccta

SEQ ID NO: 4333 - DNA, 19 bp, Homo sapiens
agacttctccagtgtacct

SEQ ID NO: 4334 - DNA, 19 bp, Homo sapiens
cagacttctccagtgtacc

SEQ ID NO: 4335 - DNA, 19 bp, Homo sapiens
gcagacttctccagtgtac

SEQ ID NO: 4336 - DNA, 19 bp, Homo sapiens
tgcagacttctccagtgta

SEQ ID NO: 4337 - DNA, 19 bp, Homo sapiens
gtgcagacttctccagtgt

SEQ ID NO: 4338 - DNA, 19 bp, Homo sapiens
ggtgcagacttctccagtg

SEQ ID NO: 4339 - DNA, 19 bp, Homo sapiens
tggtgcagacttctccagt

SEQ ID NO: 4340 - DNA, 19 bp, Homo sapiens
atggtgcagacttctccag

SEQ ID NO: 4341 - DNA, 19 bp, Homo sapiens
catggtgcagacttctcca

SEQ ID NO: 4342 - DNA, 19 bp, Homo sapiens
acatggtgcagacttctcc

SEQ ID NO: 4343 - DNA, 19 bp, Homo sapiens
gacatggtgcagacttctc

SEQ ID NO: 4344 - DNA, 19 bp, Homo sapiens
ggacatggtgcagacttct

SEQ ID NO: 4345 - DNA, 19 bp, Homo sapiens
tggacatggtgcagacttc

SEQ ID NO: 4346 - DNA, 19 bp, Homo sapiens
ctggacatggtgcagactt

SEQ ID NO: 4347 - DNA, 19 bp, Homo sapiens
actggacatggtgcagact

SEQ ID NO: 4348 - DNA, 19 bp, Homo sapiens
aactggacatggtgcagac

SEQ ID NO: 4349 - DNA, 19 bp, Homo sapiens
aaactggacatggtgcaga

SEQ ID NO: 4350 - DNA, 19 bp, Homo sapiens
gaaactggacatggtgcag

SEQ ID NO: 4351 - DNA, 19 bp, Homo sapiens
agaaactggacatggtgca

SEQ ID NO: 4352 - DNA, 19 bp, Homo sapiens
aagaaactggacatggtgc

SEQ ID NO: 4353 - DNA, 19 bp, Homo sapiens
caagaaactggacatggtg

SEQ ID NO: 4354 - DNA, 19 bp, Homo sapiens
ccaagaaactggacatggt

SEQ ID NO: 4355 - DNA, 19 bp, Homo sapiens
tccaagaaactggacatgg

SEQ ID NO: 4356 - DNA, 19 bp, Homo sapiens
gtccaagaaactggacatg

SEQ ID NO: 4357 - DNA, 19 bp, Homo sapiens
tgtccaagaaactggacat

SEQ ID NO: 4358 - DNA, 19 bp, Homo sapiens
ctgtccaagaaactggaca

SEQ ID NO: 4359 - DNA, 19 bp, Homo sapiens
tctgtccaagaaactggac

SEQ ID NO: 4360 - DNA, 19 bp, Homo sapiens
ctctgtccaagaaactgga

SEQ ID NO: 4361 - DNA, 19 bp, Homo sapiens
tctctgtccaagaaactgg

SEQ ID NO: 4362 - DNA, 19 bp, Homo sapiens
ctctctgtccaagaaactg

SEQ ID NO: 4363 - DNA, 19 bp, Homo sapiens
gctctctgtccaagaaact

SEQ ID NO: 4364 - DNA, 19 bp, Homo sapiens
tgctctctgtccaagaaac

SEQ ID NO: 4365 - DNA, 19 bp, Homo sapiens
ttgctctctgtccaagaaa

SEQ ID NO: 4366 - DNA, 19 bp, Homo sapiens
gttgctctctgtccaagaa

SEQ ID NO: 4367 - DNA, 19 bp, Homo sapiens
tgttgctctctgtccaaga

SEQ ID NO: 4368 - DNA, 19 bp, Homo sapiens
gtgttgctctctgtccaag

SEQ ID NO: 4369 - DNA, 19 bp, Homo sapiens
tgtgttgctctctgtccaa

SEQ ID NO: 4370 - DNA, 19 bp, Homo sapiens
ctgtgttgctctctgtcca

SEQ ID NO: 4371 - DNA, 19 bp, Homo sapiens
actgtgttgctctctgtcc

SEQ ID NO: 4372 - DNA, 19 bp, Homo sapiens
tactgtgttgctctctgtc

SEQ ID NO: 4373 - DNA, 19 bp, Homo sapiens
atactgtgttgctctctgt

SEQ ID NO: 4374 - DNA, 19 bp, Homo sapiens
catactgtgttgctctctg

SEQ ID NO: 4375 - DNA, 19 bp, Homo sapiens
acatactgtgttgctctct

SEQ ID NO: 4376 - DNA, 19 bp, Homo sapiens
tacatactgtgttgctctc

SEQ ID NO: 4377 - DNA, 19 bp, Homo sapiens
gtacatactgtgttgctct

SEQ ID NO: 4378 - DNA, 19 bp, Homo sapiens
tgtacatactgtgttgctc

SEQ ID NO: 4379 - DNA, 19 bp, Homo sapiens
ttgtacatactgtgttgct

SEQ ID NO: 4380 - DNA, 19 bp, Homo sapiens
gttgtacatactgtgttgc

SEQ ID NO: 4381 - DNA, 19 bp, Homo sapiens
ggttgtacatactgtgttg

SEQ ID NO: 4382 - DNA, 19 bp, Homo sapiens
aggttgtacatactgtgtt

SEQ ID NO: 4383 - DNA, 19 bp, Homo sapiens
caggttgtacatactgtgt

SEQ ID NO: 4384 - DNA, 19 bp, Homo sapiens
ccaggttgtacatactgtg

SEQ ID NO: 4385 - DNA, 19 bp, Homo sapiens
accaggttgtacatactgt

SEQ ID NO: 4386 - DNA, 19 bp, Homo sapiens
aaccaggttgtacatactg

SEQ ID NO: 4387 - DNA, 19 bp, Homo sapiens
caaccaggttgtacatact

SEQ ID NO: 4388 - DNA, 19 bp, Homo sapiens
acaaccaggttgtacatac

SEQ ID NO: 4389 - DNA, 19 bp, Homo sapiens
cacaaccaggttgtacata

SEQ ID NO: 4390 - DNA, 19 bp, Homo sapiens
tcacaaccaggttgtacat

SEQ ID NO: 4391 - DNA, 19 bp, Homo sapiens
ctcacaaccaggttgtaca

SEQ ID NO: 4392 - DNA, 19 bp, Homo sapiens
tctcacaaccaggttgtac

SEQ ID NO: 4393 - DNA, 19 bp, Homo sapiens
ctctcacaaccaggttgta

SEQ ID NO: 4394 - DNA, 19 bp, Homo sapiens
cctctcacaaccaggttgt

SEQ ID NO: 4395 - DNA, 19 bp, Homo sapiens
gcctctcacaaccaggttg

SEQ ID NO: 4396 - DNA, 19 bp, Homo sapiens
agcctctcacaaccaggtt

SEQ ID NO: 4397 - DNA, 19 bp, Homo sapiens
gagcctctcacaaccaggt

SEQ ID NO: 4398 - DNA, 19 bp, Homo sapiens
tgagcctctcacaaccagg

SEQ ID NO: 4399 - DNA, 19 bp, Homo sapiens
ctgagcctctcacaaccag

SEQ ID NO: 4400 - DNA, 19 bp, Homo sapiens
tctgagcctctcacaacca

SEQ ID NO: 4401 - DNA, 19 bp, Homo sapiens
atctgagcctctcacaacc

SEQ ID NO: 4402 - DNA, 19 bp, Homo sapiens
gatctgagcctctcacaac

SEQ ID NO: 4403 - DNA, 19 bp, Homo sapiens
cgatctgagcctctcacaa

SEQ ID NO: 4404 - DNA, 19 bp, Homo sapiens
ccgatctgagcctctcaca

SEQ ID NO: 4405 - DNA, 19 bp, Homo sapiens
cccgatctgagcctctcac

SEQ ID NO: 4406 - DNA, 19 bp, Homo sapiens
tcccgatctgagcctctca

SEQ ID NO: 4407 - DNA, 19 bp, Homo sapiens
atcccgatctgagcctctc

SEQ ID NO: 4408 - DNA, 19 bp, Homo sapiens
catcccgatctgagcctct

SEQ ID NO: 4409 - DNA, 19 bp, Homo sapiens
ccatcccgatctgagcctc

SEQ ID NO: 4410 - DNA, 19 bp, Homo sapiens
tccatcccgatctgagcct

SEQ ID NO: 4411 - DNA, 19 bp, Homo sapiens
ctccatcccgatctgagcc

SEQ ID NO: 4412 - DNA, 19 bp, Homo sapiens
gctccatcccgatctgagc

SEQ ID NO: 4413 - DNA, 19 bp, Homo sapiens
agctccatcccgatctgag

SEQ ID NO: 4414 - DNA, 19 bp, Homo sapiens
cagctccatcccgatctga

SEQ ID NO: 4415 - DNA, 19 bp, Homo sapiens
gcagctccatcccgatctg

SEQ ID NO: 4416 - DNA, 19 bp, Homo sapiens
tgcagctccatcccgatct

SEQ ID NO: 4417 - DNA, 19 bp, Homo sapiens
ctgcagctccatcccgatc

SEQ ID NO: 4418 - DNA, 19 bp, Homo sapiens
tctgcagctccatcccgat

SEQ ID NO: 4419 - DNA, 19 bp, Homo sapiens
atctgcagctccatcccga

SEQ ID NO: 4420 - DNA, 19 bp, Homo sapiens
catctgcagctccatcccg

SEQ ID NO: 4421 - DNA, 19 bp, Homo sapiens
ccatctgcagctccatccc

SEQ ID NO: 4422 - DNA, 19 bp, Homo sapiens
tccatctgcagctccatcc

SEQ ID NO: 4423 - DNA, 19 bp, Homo sapiens
gtccatctgcagctccatc

SEQ ID NO: 4424 - DNA, 19 bp, Homo sapiens
agtccatctgcagctccat

SEQ ID NO: 4425 - DNA, 19 bp, Homo sapiens
cagtccatctgcagctcca

SEQ ID NO: 4426 - DNA, 19 bp, Homo sapiens
acagtccatctgcagctcc

SEQ ID NO: 4427 - DNA, 19 bp, Homo sapiens
gacagtccatctgcagctc

SEQ ID NO: 4428 - DNA, 19 bp, Homo sapiens
agacagtccatctgcagct

SEQ ID NO: 4429 - DNA, 19 bp, Homo sapiens
aagacagtccatctgcagc

SEQ ID NO: 4430 - DNA, 19 bp, Homo sapiens
gaagacagtccatctgcag

SEQ ID NO: 4431 - DNA, 19 bp, Homo sapiens
agaagacagtccatctgca

SEQ ID NO: 4432 - DNA, 19 bp, Homo sapiens
cagaagacagtccatctgc

SEQ ID NO: 4433 - DNA, 19 bp, Homo sapiens
tcagaagacagtccatctg

SEQ ID NO: 4434 - DNA, 19 bp, Homo sapiens
ctcagaagacagtccatct

SEQ ID NO: 4435 - DNA, 19 bp, Homo sapiens
actcagaagacagtccatc

SEQ ID NO: 4436 - DNA, 19 bp, Homo sapiens
cactcagaagacagtccat

SEQ ID NO: 4437 - DNA, 19 bp, Homo sapiens
acactcagaagacagtcca

SEQ ID NO: 4438 - DNA, 19 bp, Homo sapiens
cacactcagaagacagtcc

SEQ ID NO: 4439 - DNA, 19 bp, Homo sapiens
tcacactcagaagacagtc

SEQ ID NO: 4440 - DNA, 19 bp, Homo sapiens
gtcacactcagaagacagt

SEQ ID NO: 4441 - DNA, 19 bp, Homo sapiens
agtcacactcagaagacag

SEQ ID NO: 4442 - DNA, 19 bp, Homo sapiens
cagtcacactcagaagaca

SEQ ID NO: 4443 - DNA, 19 bp, Homo sapiens
acagtcacactcagaagac

SEQ ID NO: 4444 - DNA, 19 bp, Homo sapiens
tacagtcacactcagaaga

SEQ ID NO: 4445 - DNA, 19 bp, Homo sapiens
ctacagtcacactcagaag

SEQ ID NO: 4446 - DNA, 19 bp, Homo sapiens
tctacagtcacactcagaa

SEQ ID NO: 4447 - DNA, 19 bp, Homo sapiens
ttctacagtcacactcaga

SEQ ID NO: 4448 - DNA, 19 bp, Homo sapiens
attctacagtcacactcag

SEQ ID NO: 4449 - DNA, 19 bp, Homo sapiens
gattctacagtcacactca

SEQ ID NO: 4450 - DNA, 19 bp, Homo sapiens
tgattctacagtcacactc

SEQ ID NO: 4451 - DNA, 19 bp, Homo sapiens
ttgattctacagtcacact

SEQ ID NO: 4452 - DNA, 19 bp, Homo sapiens
cttgattctacagtcacac

SEQ ID NO: 4453 - DNA, 19 bp, Homo sapiens
ccttgattctacagtcaca

SEQ ID NO: 4454 - DNA, 19 bp, Homo sapiens
accttgattctacagtcac

SEQ ID NO: 4455 - DNA, 19 bp, Homo sapiens
aaccttgattctacagtca

SEQ ID NO: 4456 - DNA, 19 bp, Homo sapiens
aaaccttgattctacagtc

SEQ ID NO: 4457 - DNA, 19 bp, Homo sapiens
aaaaccttgattctacagt

SEQ ID NO: 4458 - DNA, 19 bp, Homo sapiens
taaaaccttgattctacag

SEQ ID NO: 4459 - DNA, 19 bp, Homo sapiens
ctaaaaccttgattctaca

SEQ ID NO: 4460 - DNA, 19 bp, Homo sapiens
tctaaaaccttgattctac

SEQ ID NO: 4461 - DNA, 19 bp, Homo sapiens
gtctaaaaccttgattcta

SEQ ID NO: 4462 - DNA, 19 bp, Homo sapiens
cgtctaaaaccttgattct

SEQ ID NO: 4463 - DNA, 19 bp, Homo sapiens
acgtctaaaaccttgattc

SEQ ID NO: 4464 - DNA, 19 bp, Homo sapiens
gacgtctaaaaccttgatt

SEQ ID NO: 4465 - DNA, 19 bp, Homo sapiens
tgacgtctaaaaccttgat

SEQ ID NO: 4466 - DNA, 19 bp, Homo sapiens
ttgacgtctaaaaccttga

SEQ ID NO: 4467 - DNA, 19 bp, Homo sapiens
gttgacgtctaaaaccttg

SEQ ID NO: 4468 - DNA, 19 bp, Homo sapiens
cgttgacgtctaaaacctt

SEQ ID NO: 4469 - DNA, 19 bp, Homo sapiens
tcgttgacgtctaaaacct

SEQ ID NO: 4470 - DNA, 19 bp, Homo sapiens
atcgttgacgtctaaaacc

SEQ ID NO: 4471 - DNA, 19 bp, Homo sapiens
tatcgttgacgtctaaaac

SEQ ID NO: 4472 - DNA, 19 bp, Homo sapiens
ttatcgttgacgtctaaaa

SEQ ID NO: 4473 - DNA, 19 bp, Homo sapiens
attatcgttgacgtctaaa

SEQ ID NO: 4474 - DNA, 19 bp, Homo sapiens
aattatcgttgacgtctaa

SEQ ID NO: 4475 - DNA, 19 bp, Homo sapiens
aaattatcgttgacgtcta

SEQ ID NO: 4476 - DNA, 19 bp, Homo sapiens
gaaattatcgttgacgtct

SEQ ID NO: 4477 - DNA, 19 bp, Homo sapiens
ggaaattatcgttgacgtc

SEQ ID NO: 4478 - DNA, 19 bp, Homo sapiens
gggaaattatcgttgacgt

SEQ ID NO: 4479 - DNA, 19 bp, Homo sapiens
ggggaaattatcgttgacg

SEQ ID NO: 4480 - DNA, 19 bp, Homo sapiens
tggggaaattatcgttgac

SEQ ID NO: 4481 - DNA, 19 bp, Homo sapiens
gtggggaaattatcgttga

SEQ ID NO: 4482 - DNA, 19 bp, Homo sapiens
ggtggggaaattatcgttg

SEQ ID NO: 4483 - DNA, 19 bp, Homo sapiens
aggtggggaaattatcgtt

SEQ ID NO: 4484 - DNA, 19 bp, Homo sapiens
aaggtggggaaattatcgt

SEQ ID NO: 4485 - DNA, 19 bp, Homo sapiens
taaggtggggaaattatcg

SEQ ID NO: 4486 - DNA, 19 bp, Homo sapiens
ctaaggtggggaaattatc

SEQ ID NO: 4487 - DNA, 19 bp, Homo sapiens
tctaaggtggggaaattat

SEQ ID NO: 4488 - DNA, 19 bp, Homo sapiens
ctctaaggtggggaaatta

SEQ ID NO: 4489 - DNA, 19 bp, Homo sapiens
tctctaaggtggggaaatt

SEQ ID NO: 4490 - DNA, 19 bp, Homo sapiens
ttctctaaggtggggaaat

SEQ ID NO: 4491 - DNA, 19 bp, Homo sapiens
tttctctaaggtggggaaa

SEQ ID NO: 4492 - DNA, 19 bp, Homo sapiens
ttttctctaaggtggggaa

SEQ ID NO: 4493 - DNA, 19 bp, Homo sapiens
gttttctctaaggtgggga

SEQ ID NO: 4494 - DNA, 19 bp, Homo sapiens
agttttctctaaggtgggg

SEQ ID NO: 4495 - DNA, 19 bp, Homo sapiens
aagttttctctaaggtggg

SEQ ID NO: 4496 - DNA, 19 bp, Homo sapiens
gaagttttctctaaggtgg

SEQ ID NO: 4497 - DNA, 19 bp, Homo sapiens
tgaagttttctctaaggtg

SEQ ID NO: 4498 - DNA, 19 bp, Homo sapiens
atgaagttttctctaaggt

SEQ ID NO: 4499 - DNA, 19 bp, Homo sapiens
tatgaagttttctctaagg

SEQ ID NO: 4500 - DNA, 19 bp, Homo sapiens
gtatgaagttttctctaag

SEQ ID NO: 4501 - DNA, 19 bp, Homo sapiens
agtatgaagttttctctaa

SEQ ID NO: 4502 - DNA, 19 bp, Homo sapiens
gagtatgaagttttctcta

SEQ ID NO: 4503 - DNA, 19 bp, Homo sapiens
tgagtatgaagttttctct

SEQ ID NO: 4504 - DNA, 19 bp, Homo sapiens
ctgagtatgaagttttctc

SEQ ID NO: 4505 - DNA, 19 bp, Homo sapiens
gctgagtatgaagttttct

SEQ ID NO: 4506 - DNA, 19 bp, Homo sapiens
ggctgagtatgaagttttc

SEQ ID NO: 4507 - DNA, 19 bp, Homo sapiens
tggctgagtatgaagtttt

SEQ ID NO: 4508 - DNA, 19 bp, Homo sapiens
ctggctgagtatgaagttt

SEQ ID NO: 4509 - DNA, 19 bp, Homo sapiens
actggctgagtatgaagtt

SEQ ID NO: 4510 - DNA, 19 bp, Homo sapiens
tactggctgagtatgaagt

SEQ ID NO: 4511 - DNA, 19 bp, Homo sapiens
atactggctgagtatgaag

SEQ ID NO: 4512 - DNA, 19 bp, Homo sapiens
aatactggctgagtatgaa

SEQ ID NO: 4513 - DNA, 19 bp, Homo sapiens
caatactggctgagtatga

SEQ ID NO: 4514 - DNA, 19 bp, Homo sapiens
tcaatactggctgagtatg

SEQ ID NO: 4515 - DNA, 19 bp, Homo sapiens
ttcaatactggctgagtat

SEQ ID NO: 4516 - DNA, 19 bp, Homo sapiens
cttcaatactggctgagta

SEQ ID NO: 4517 - DNA, 19 bp, Homo sapiens
tcttcaatactggctgagt

SEQ ID NO: 4518 - DNA, 19 bp, Homo sapiens
ctcttcaatactggctgag

SEQ ID NO: 4519 - DNA, 19 bp, Homo sapiens
tctcttcaatactggctga

SEQ ID NO: 4520 - DNA, 19 bp, Homo sapiens
ttctcttcaatactggctg

SEQ ID NO: 4521 - DNA, 19 bp, Homo sapiens
attctcttcaatactggct

SEQ ID NO: 4522 - DNA, 19 bp, Homo sapiens
aattctcttcaatactggc

SEQ ID NO: 4523 - DNA, 19 bp, Homo sapiens
caattctcttcaatactgg

SEQ ID NO: 4524 - DNA, 19 bp, Homo sapiens
acaattctcttcaatactg

SEQ ID NO: 4525 - DNA, 19 bp, Homo sapiens
aacaattctcttcaatact

SEQ ID NO: 4526 - DNA, 19 bp, Homo sapiens
aaacaattctcttcaatac

SEQ ID NO: 4527 - DNA, 19 bp, Homo sapiens
taaacaattctcttcaata

SEQ ID NO: 4528 - DNA, 19 bp, Homo sapiens
ttaaacaattctcttcaat

SEQ ID NO: 4529 - DNA, 19 bp, Homo sapiens
cttaaacaattctcttcaa

SEQ ID NO: 4530 - DNA, 19 bp, Homo sapiens
acttaaacaattctcttca

SEQ ID NO: 4531 - DNA, 19 bp, Homo sapiens
aacttaaacaattctcttc

SEQ ID NO: 4532 - DNA, 19 bp, Homo sapiens
gaacttaaacaattctctt

SEQ ID NO: 4533 - DNA, 19 bp, Homo sapiens
cgaacttaaacaattctct

SEQ ID NO: 4534 - DNA, 19 bp, Homo sapiens
ccgaacttaaacaattctc

SEQ ID NO: 4535 - DNA, 19 bp, Homo sapiens
tccgaacttaaacaattct

SEQ ID NO: 4536 - DNA, 19 bp, Homo sapiens
ttccgaacttaaacaattc

SEQ ID NO: 4537 - DNA, 19 bp, Homo sapiens
gttccgaacttaaacaatt

SEQ ID NO: 4538 - DNA, 19 bp, Homo sapiens
agttccgaacttaaacaat

SEQ ID NO: 4539 - DNA, 19 bp, Homo sapiens
cagttccgaacttaaacaa

SEQ ID NO: 4540 - DNA, 19 bp, Homo sapiens
tcagttccgaacttaaaca

SEQ ID NO: 4541 - DNA, 19 bp, Homo sapiens
atcagttccgaacttaaac

SEQ ID NO: 4542 - DNA, 19 bp, Homo sapiens
tatcagttccgaacttaaa

SEQ ID NO: 4543 - DNA, 19 bp, Homo sapiens
gtatcagttccgaacttaa

SEQ ID NO: 4544 - DNA, 19 bp, Homo sapiens
cgtatcagttccgaactta

SEQ ID NO: 4545 - DNA, 19 bp, Homo sapiens
tcgtatcagttccgaactt

SEQ ID NO: 4546 - DNA, 19 bp, Homo sapiens
atcgtatcagttccgaact

SEQ ID NO: 4547 - DNA, 19 bp, Homo sapiens
aatcgtatcagttccgaac

SEQ ID NO: 4548 - DNA, 19 bp, Homo sapiens
taatcgtatcagttccgaa

SEQ ID NO: 4549 - DNA, 19 bp, Homo sapiens
gtaatcgtatcagttccga

SEQ ID NO: 4550 - DNA, 19 bp, Homo sapiens
tgtaatcgtatcagttccg

SEQ ID NO: 4551 - DNA, 19 bp, Homo sapiens
ttgtaatcgtatcagttcc

SEQ ID NO: 4552 - DNA, 19 bp, Homo sapiens
cttgtaatcgtatcagttc

SEQ ID NO: 4553 - DNA, 19 bp, Homo sapiens
gcttgtaatcgtatcagtt

SEQ ID NO: 4554 - DNA, 19 bp, Homo sapiens
tgcttgtaatcgtatcagt

SEQ ID NO: 4555 - DNA, 19 bp, Homo sapiens
ttgcttgtaatcgtatcag

SEQ ID NO: 4556 - DNA, 19 bp, Homo sapiens
attgcttgtaatcgtatca

SEQ ID NO: 4557 - DNA, 19 bp, Homo sapiens
aattgcttgtaatcgtatc

SEQ ID NO: 4558 - DNA, 19 bp, Homo sapiens
caattgcttgtaatcgtat

SEQ ID NO: 4559 - DNA, 19 bp, Homo sapiens
tcaattgcttgtaatcgta

SEQ ID NO: 4560 - DNA, 19 bp, Homo sapiens
atcaattgcttgtaatcgt

SEQ ID NO: 4561 - DNA, 19 bp, Homo sapiens
gatcaattgcttgtaatcg

SEQ ID NO: 4562 - DNA, 19 bp, Homo sapiens
agatcaattgcttgtaatc

SEQ ID NO: 4563 - DNA, 19 bp, Homo sapiens
aagatcaattgcttgtaat

SEQ ID NO: 4564 - DNA, 19 bp, Homo sapiens
caagatcaattgcttgtaa

SEQ ID NO: 4565 - DNA, 19 bp, Homo sapiens
tcaagatcaattgcttgta

SEQ ID NO: 4566 - DNA, 19 bp, Homo sapiens
atcaagatcaattgcttgt

SEQ ID NO: 4567 - DNA, 19 bp, Homo sapiens
catcaagatcaattgcttg

SEQ ID NO: 4568 - DNA, 19 bp, Homo sapiens
tcatcaagatcaattgctt

SEQ ID NO: 4569 - DNA, 19 bp, Homo sapiens
ttcatcaagatcaattgct

SEQ ID NO: 4570 - DNA, 19 bp, Homo sapiens
cttcatcaagatcaattgc

SEQ ID NO: 4571 - DNA, 19 bp, Homo sapiens
tcttcatcaagatcaattg

SEQ ID NO: 4572 - DNA, 19 bp, Homo sapiens
ttcttcatcaagatcaatt

SEQ ID NO: 4573 - DNA, 19 bp, Homo sapiens
cttcttcatcaagatcaat

SEQ ID NO: 4574 - DNA, 19 bp, Homo sapiens
ccttcttcatcaagatcaa

SEQ ID NO: 4575 - DNA, 19 bp, Homo sapiens
gccttcttcatcaagatca

SEQ ID NO: 4576 - DNA, 19 bp, Homo sapiens
tgccttcttcatcaagatc

SEQ ID NO: 4577 - DNA, 19 bp, Homo sapiens
gtgccttcttcatcaagat

SEQ ID NO: 4578 - DNA, 19 bp, Homo sapiens
agtgccttcttcatcaaga

SEQ ID NO: 4579 - DNA, 19 bp, Homo sapiens
cagtgccttcttcatcaag

SEQ ID NO: 4580 - DNA, 19 bp, Homo sapiens
tcagtgccttcttcatcaa

SEQ ID NO: 4581 - DNA, 19 bp, Homo sapiens
atcagtgccttcttcatca

SEQ ID NO: 4582 - DNA, 19 bp, Homo sapiens
tatcagtgccttcttcatc

SEQ ID NO: 4583 - DNA, 19 bp, Homo sapiens
ttatcagtgccttcttcat

SEQ ID NO: 4584 - DNA, 19 bp, Homo sapiens
gttatcagtgccttcttca

SEQ ID NO: 4585 - DNA, 19 bp, Homo sapiens
agttatcagtgccttcttc

SEQ ID NO: 4586 - DNA, 19 bp, Homo sapiens
cagttatcagtgccttctt

SEQ ID NO: 4587 - DNA, 19 bp, Homo sapiens
ccagttatcagtgccttct

SEQ ID NO: 4588 - DNA, 19 bp, Homo sapiens
accagttatcagtgccttc

SEQ ID NO: 4589 - DNA, 19 bp, Homo sapiens
aaccagttatcagtgcctt

SEQ ID NO: 4590 - DNA, 19 bp, Homo sapiens
caaccagttatcagtgcct

SEQ ID NO: 4591 - DNA, 19 bp, Homo sapiens
ccaaccagttatcagtgcc

SEQ ID NO: 4592 - DNA, 19 bp, Homo sapiens
gccaaccagttatcagtgc

SEQ ID NO: 4593 - DNA, 19 bp, Homo sapiens
agccaaccagttatcagtg

SEQ ID NO: 4594 - DNA, 19 bp, Homo sapiens
gagccaaccagttatcagt

SEQ ID NO: 4595 - DNA, 19 bp, Homo sapiens
tgagccaaccagttatcag

SEQ ID NO: 4596 - DNA, 19 bp, Homo sapiens
ttgagccaaccagttatca

SEQ ID NO: 4597 - DNA, 19 bp, Homo sapiens
attgagccaaccagttatc

SEQ ID NO: 4598 - DNA, 19 bp, Homo sapiens
tattgagccaaccagttat

SEQ ID NO: 4599 - DNA, 19 bp, Homo sapiens
atattgagccaaccagtta

SEQ ID NO: 4600 - DNA, 19 bp, Homo sapiens
aatattgagccaaccagtt

SEQ ID NO: 4601 - DNA, 19 bp, Homo sapiens
aaatattgagccaaccagt

SEQ ID NO: 4602 - DNA, 19 bp, Homo sapiens
taaatattgagccaaccag

SEQ ID NO: 4603 - DNA, 19 bp, Homo sapiens
ttaaatattgagccaacca

SEQ ID NO: 4604 - DNA, 19 bp, Homo sapiens
attaaatattgagccaacc

SEQ ID NO: 4605 - DNA, 19 bp, Homo sapiens
aattaaatattgagccaac

SEQ ID NO: 4606 - DNA, 19 bp, Homo sapiens
gaattaaatattgagccaa

SEQ ID NO: 4607 - DNA, 19 bp, Homo sapiens
agaattaaatattgagcca

SEQ ID NO: 4608 - DNA, 19 bp, Homo sapiens
gagaattaaatattgagcc

SEQ ID NO: 4609 - DNA, 19 bp, Homo sapiens
agagaattaaatattgagc

SEQ ID NO: 4610 - DNA, 19 bp, Homo sapiens
gagagaattaaatattgag

SEQ ID NO: 4611 - DNA, 19 bp, Homo sapiens
agagagaattaaatattga

SEQ ID NO: 4612 - DNA, 19 bp, Homo sapiens
cagagagaattaaatattg

SEQ ID NO: 4613 - DNA, 19 bp, Homo sapiens
ccagagagaattaaatatt

SEQ ID NO: 4614 - DNA, 19 bp, Homo sapiens
tccagagagaattaaatat

SEQ ID NO: 4615 - DNA, 19 bp, Homo sapiens
ttccagagagaattaaata

SEQ ID NO: 4616 - DNA, 19 bp, Homo sapiens
tttccagagagaattaaat

SEQ ID NO: 4617 - DNA, 19 bp, Homo sapiens
atttccagagagaattaaa

SEQ ID NO: 4618 - DNA, 19 bp, Homo sapiens
catttccagagagaattaa

SEQ ID NO: 4619 - DNA, 19 bp, Homo sapiens
tcatttccagagagaatta

SEQ ID NO: 4620 - DNA, 19 bp, Homo sapiens
atcatttccagagagaatt

SEQ ID NO: 4621 - DNA, 19 bp, Homo sapiens
catcatttccagagagaat

SEQ ID NO: 4622 - DNA, 19 bp, Homo sapiens
ccatcatttccagagagaa

SEQ ID NO: 4623 - DNA, 19 bp, Homo sapiens
cccatcatttccagagaga

SEQ ID NO: 4624 - DNA, 19 bp, Homo sapiens
tcccatcatttccagagag

SEQ ID NO: 4625 - DNA, 19 bp, Homo sapiens
ttcccatcatttccagaga

SEQ ID NO: 4626 - DNA, 19 bp, Homo sapiens
attcccatcatttccagag

SEQ ID NO: 4627 - DNA, 19 bp, Homo sapiens
aattcccatcatttccaga

SEQ ID NO: 4628 - DNA, 19 bp, Homo sapiens
caattcccatcatttccag

SEQ ID NO: 4629 - DNA, 19 bp, Homo sapiens
ccaattcccatcatttcca

SEQ ID NO: 4630 - DNA, 19 bp, Homo sapiens
accaattcccatcatttcc

SEQ ID NO: 4631 - DNA, 19 bp, Homo sapiens
aaccaattcccatcatttc

SEQ ID NO: 4632 - DNA, 19 bp, Homo sapiens
gaaccaattcccatcattt

SEQ ID NO: 4633 - DNA, 19 bp, Homo sapiens
cgaaccaattcccatcatt

SEQ ID NO: 4634 - DNA, 19 bp, Homo sapiens
tcgaaccaattcccatcat

SEQ ID NO: 4635 - DNA, 19 bp, Homo sapiens
atcgaaccaattcccatca

SEQ ID NO: 4636 - DNA, 19 bp, Homo sapiens
tatcgaaccaattcccatc

SEQ ID NO: 4637 - DNA, 19 bp, Homo sapiens
atatcgaaccaattcccat

SEQ ID NO: 4638 - DNA, 19 bp, Homo sapiens
aatatcgaaccaattccca

SEQ ID NO: 4639 - DNA, 19 bp, Homo sapiens
gaatatcgaaccaattccc

SEQ ID NO: 4640 - DNA, 19 bp, Homo sapiens
tgaatatcgaaccaattcc

SEQ ID NO: 4641 - DNA, 19 bp, Homo sapiens
ttgaatatcgaaccaattc

SEQ ID NO: 4642 - DNA, 19 bp, Homo sapiens
tttgaatatcgaaccaatt

SEQ ID NO: 4643 - DNA, 19 bp, Homo sapiens
gtttgaatatcgaaccaat

SEQ ID NO: 4644 - DNA, 19 bp, Homo sapiens
tgtttgaatatcgaaccaa

SEQ ID NO: 4645 - DNA, 19 bp, Homo sapiens
ctgtttgaatatcgaacca

SEQ ID NO: 4646 - DNA, 19 bp, Homo sapiens
tctgtttgaatatcgaacc

SEQ ID NO: 4647 - DNA, 19 bp, Homo sapiens
atctgtttgaatatcgaac

SEQ ID NO: 4648 - DNA, 19 bp, Homo sapiens
gatctgtttgaatatcgaa

SEQ ID NO: 4649 - DNA, 19 bp, Homo sapiens
ggatctgtttgaatatcga

SEQ ID NO: 4650 - DNA, 19 bp, Homo sapiens
tggatctgtttgaatatcg

SEQ ID NO: 4651 - DNA, 19 bp, Homo sapiens
gtggatctgtttgaatatc

SEQ ID NO: 4652 - DNA, 19 bp, Homo sapiens
tgtggatctgtttgaatat

SEQ ID NO: 4653 - DNA, 19 bp, Homo sapiens
ttgtggatctgtttgaata

SEQ ID NO: 4654 - DNA, 19 bp, Homo sapiens
tttgtggatctgtttgaat

SEQ ID NO: 4655 - DNA, 19 bp, Homo sapiens
gtttgtggatctgtttgaa

SEQ ID NO: 4656 - DNA, 19 bp, Homo sapiens
ggtttgtggatctgtttga

SEQ ID NO: 4657 - DNA, 19 bp, Homo sapiens
tggtttgtggatctgtttg

SEQ ID NO: 4658 - DNA, 19 bp, Homo sapiens
ttggtttgtggatctgttt

SEQ ID NO: 4659 - DNA, 19 bp, Homo sapiens
attggtttgtggatctgtt

SEQ ID NO: 4660 - DNA, 19 bp, Homo sapiens
cattggtttgtggatctgt

SEQ ID NO: 4661 - DNA, 19 bp, Homo sapiens
tcattggtttgtggatctg

SEQ ID NO: 4662 - DNA, 19 bp, Homo sapiens
ttcattggtttgtggatct

SEQ ID NO: 4663 - DNA, 19 bp, Homo sapiens
cttcattggtttgtggatc

SEQ ID NO: 4664 - DNA, 19 bp, Homo sapiens
ccttcattggtttgtggat

SEQ ID NO: 4665 - DNA, 19 bp, Homo sapiens
gccttcattggtttgtgga

SEQ ID NO: 4666 - DNA, 19 bp, Homo sapiens
tgccttcattggtttgtgg

SEQ ID NO: 4667 - DNA, 19 bp, Homo sapiens
atgccttcattggtttgtg

SEQ ID NO: 4668 - DNA, 19 bp, Homo sapiens
aatgccttcattggtttgt

SEQ ID NO: 4669 - DNA, 19 bp, Homo sapiens
aaatgccttcattggtttg

SEQ ID NO: 4670 - DNA, 19 bp, Homo sapiens
aaaatgccttcattggttt

SEQ ID NO: 4671 - DNA, 19 bp, Homo sapiens
caaaatgccttcattggtt

SEQ ID NO: 4672 - DNA, 19 bp, Homo sapiens
tcaaaatgccttcattggt

SEQ ID NO: 4673 - DNA, 19 bp, Homo sapiens
ttcaaaatgccttcattgg

SEQ ID NO: 4674 - DNA, 19 bp, Homo sapiens
tttcaaaatgccttcattg

SEQ ID NO: 4675 - DNA, 19 bp, Homo sapiens
ctttcaaaatgccttcatt

SEQ ID NO: 4676 - DNA, 19 bp, Homo sapiens
actttcaaaatgccttcat

SEQ ID NO: 4677 - DNA, 19 bp, Homo sapiens
aactttcaaaatgccttca

SEQ ID NO: 4678 - DNA, 19 bp, Homo sapiens
caactttcaaaatgccttc

SEQ ID NO: 4679 - DNA, 19 bp, Homo sapiens
acaactttcaaaatgcctt

SEQ ID NO: 4680 - DNA, 19 bp, Homo sapiens
gacaactttcaaaatgcct

SEQ ID NO: 4681 - DNA, 19 bp, Homo sapiens
tgacaactttcaaaatgcc

SEQ ID NO: 4682 - DNA, 19 bp, Homo sapiens
ttgacaactttcaaaatgc

SEQ ID NO: 4683 - DNA, 19 bp, Homo sapiens
cttgacaactttcaaaatg

SEQ ID NO: 4684 - DNA, 19 bp, Homo sapiens
tcttgacaactttcaaaat

SEQ ID NO: 4685 - DNA, 19 bp, Homo sapiens
atcttgacaactttcaaaa

SEQ ID NO: 4686 - DNA, 19 bp, Homo sapiens
catcttgacaactttcaaa

SEQ ID NO: 4687 - DNA, 19 bp, Homo sapiens
gcatcttgacaactttcaa

SEQ ID NO: 4688 - DNA, 19 bp, Homo sapiens
agcatcttgacaactttca

SEQ ID NO: 4689 - DNA, 19 bp, Homo sapiens
cagcatcttgacaactttc

SEQ ID NO: 4690 - DNA, 19 bp, Homo sapiens
ccagcatcttgacaacttt

SEQ ID NO: 4691 - DNA, 19 bp, Homo sapiens
tccagcatcttgacaactt

SEQ ID NO: 4692 - DNA, 19 bp, Homo sapiens
atccagcatcttgacaact

SEQ ID NO: 4693 - DNA, 19 bp, Homo sapiens
aatccagcatcttgacaac

SEQ ID NO: 4694 - DNA, 19 bp, Homo sapiens
taatccagcatcttgacaa

SEQ ID NO: 4695 - DNA, 19 bp, Homo sapiens
ataatccagcatcttgaca

SEQ ID NO: 4696 - DNA, 19 bp, Homo sapiens
cataatccagcatcttgac

SEQ ID NO: 4697 - DNA, 19 bp, Homo sapiens
tcataatccagcatcttga

SEQ ID NO: 4698 - DNA, 19 bp, Homo sapiens
ttcataatccagcatcttg

SEQ ID NO: 4699 - DNA, 19 bp, Homo sapiens
gttcataatccagcatctt

SEQ ID NO: 4700 - DNA, 19 bp, Homo sapiens
tgttcataatccagcatct

SEQ ID NO: 4701 - DNA, 19 bp, Homo sapiens
ttgttcataatccagcatc

SEQ ID NO: 4702 - DNA, 19 bp, Homo sapiens
cttgttcataatccagcat

SEQ ID NO: 4703 - DNA, 19 bp, Homo sapiens
gcttgttcataatccagca

SEQ ID NO: 4704 - DNA, 19 bp, Homo sapiens
tgcttgttcataatccagc

SEQ ID NO: 4705 - DNA, 19 bp, Homo sapiens
gtgcttgttcataatccag

SEQ ID NO: 4706 - DNA, 19 bp, Homo sapiens
ggtgcttgttcataatcca

SEQ ID NO: 4707 - DNA, 19 bp, Homo sapiens
aggtgcttgttcataatcc

SEQ ID NO: 4708 - DNA, 19 bp, Homo sapiens
taggtgcttgttcataatc

SEQ ID NO: 4709 - DNA, 19 bp, Homo sapiens
ttaggtgcttgttcataat

SEQ ID NO: 4710 - DNA, 19 bp, Homo sapiens
gttaggtgcttgttcataa

SEQ ID NO: 4711 - DNA, 19 bp, Homo sapiens
tgttaggtgcttgttcata

SEQ ID NO: 4712 - DNA, 19 bp, Homo sapiens
atgttaggtgcttgttcat

SEQ ID NO: 4713 - DNA, 19 bp, Homo sapiens
aatgttaggtgcttgttca

SEQ ID NO: 4714 - DNA, 19 bp, Homo sapiens
gaatgttaggtgcttgttc

SEQ ID NO: 4715 - DNA, 19 bp, Homo sapiens
tgaatgttaggtgcttgtt

SEQ ID NO: 4716 - DNA, 19 bp, Homo sapiens
ctgaatgttaggtgcttgt

SEQ ID NO: 4717 - DNA, 19 bp, Homo sapiens
gctgaatgttaggtgcttg

SEQ ID NO: 4718 - DNA, 19 bp, Homo sapiens
agctgaatgttaggtgctt

SEQ ID NO: 4719 - DNA, 19 bp, Homo sapiens
aagctgaatgttaggtgct

SEQ ID NO: 4720 - DNA, 19 bp, Homo sapiens
taagctgaatgttaggtgc

SEQ ID NO: 4721 - DNA, 19 bp, Homo sapiens
ctaagctgaatgttaggtg

SEQ ID NO: 4722 - DNA, 19 bp, Homo sapiens
actaagctgaatgttaggt

SEQ ID NO: 4723 - DNA, 19 bp, Homo sapiens
tactaagctgaatgttagg

SEQ ID NO: 4724 - DNA, 19 bp, Homo sapiens
atactaagctgaatgttag

SEQ ID NO: 4725 - DNA, 19 bp, Homo sapiens
gatactaagctgaatgtta

SEQ ID NO: 4726 - DNA, 19 bp, Homo sapiens
cgatactaagctgaatgtt

SEQ ID NO: 4727 - DNA, 19 bp, Homo sapiens
ccgatactaagctgaatgt

SEQ ID NO: 4728 - DNA, 19 bp, Homo sapiens
tccgatactaagctgaatg

SEQ ID NO: 4729 - DNA, 19 bp, Homo sapiens
ctccgatactaagctgaat

SEQ ID NO: 4730 - DNA, 19 bp, Homo sapiens
actccgatactaagctgaa

SEQ ID NO: 4731 - DNA, 19 bp, Homo sapiens
aactccgatactaagctga

SEQ ID NO: 4732 - DNA, 19 bp, Homo sapiens
taactccgatactaagctg

SEQ ID NO: 4733 - DNA, 19 bp, Homo sapiens
ttaactccgatactaagct

SEQ ID NO: 4734 - DNA, 19 bp, Homo sapiens
tttaactccgatactaagc

SEQ ID NO: 4735 - DNA, 19 bp, Homo sapiens
ttttaactccgatactaag

SEQ ID NO: 4736 - DNA, 19 bp, Homo sapiens
tttttaactccgatactaa

SEQ ID NO: 4737 - DNA, 19 bp, Homo sapiens
gtttttaactccgatacta

SEQ ID NO: 4738 - DNA, 19 bp, Homo sapiens
ggtttttaactccgatact

SEQ ID NO: 4739 - DNA, 19 bp, Homo sapiens
tggtttttaactccgatac

SEQ ID NO: 4740 - DNA, 19 bp, Homo sapiens
ttggtttttaactccgata

SEQ ID NO: 4741 - DNA, 19 bp, Homo sapiens
cttggtttttaactccgat

SEQ ID NO: 4742 - DNA, 19 bp, Homo sapiens
gcttggtttttaactccga

SEQ ID NO: 4743 - DNA, 19 bp, Homo sapiens
agcttggtttttaactccg

SEQ ID NO: 4744 - DNA, 19 bp, Homo sapiens
cagcttggtttttaactcc

SEQ ID NO: 4745 - DNA, 19 bp, Homo sapiens
tcagcttggtttttaactc

SEQ ID NO: 4746 - DNA, 19 bp, Homo sapiens
atcagcttggtttttaact

SEQ ID NO: 4747 - DNA, 19 bp, Homo sapiens
aatcagcttggtttttaac

SEQ ID NO: 4748 - DNA, 19 bp, Homo sapiens
aaatcagcttggtttttaa

SEQ ID NO: 4749 - DNA, 19 bp, Homo sapiens
aaaatcagcttggttttta

SEQ ID NO: 4750 - DNA, 19 bp, Homo sapiens
gaaaatcagcttggttttt

SEQ ID NO: 4751 - DNA, 19 bp, Homo sapiens
tgaaaatcagcttggtttt

SEQ ID NO: 4752 - DNA, 19 bp, Homo sapiens
gtgaaaatcagcttggttt

SEQ ID NO: 4753 - DNA, 19 bp, Homo sapiens
agtgaaaatcagcttggtt

SEQ ID NO: 4754 - DNA, 19 bp, Homo sapiens
tagtgaaaatcagcttggt

SEQ ID NO: 4755 - DNA, 19 bp, Homo sapiens
gtagtgaaaatcagcttgg

SEQ ID NO: 4756 - DNA, 19 bp, Homo sapiens
agtagtgaaaatcagcttg

SEQ ID NO: 4757 - DNA, 19 bp, Homo sapiens
gagtagtgaaaatcagctt

SEQ ID NO: 4758 - DNA, 19 bp, Homo sapiens
ggagtagtgaaaatcagct

SEQ ID NO: 4759 - DNA, 19 bp, Homo sapiens
cggagtagtgaaaatcagc

SEQ ID NO: 4760 - DNA, 19 bp, Homo sapiens
acggagtagtgaaaatcag

SEQ ID NO: 4761 - DNA, 19 bp, Homo sapiens
aacggagtagtgaaaatca

SEQ ID NO: 4762 - DNA, 19 bp, Homo sapiens
caacggagtagtgaaaatc

SEQ ID NO: 4763 - DNA, 19 bp, Homo sapiens
gcaacggagtagtgaaaat

SEQ ID NO: 4764 - DNA, 19 bp, Homo sapiens
agcaacggagtagtgaaaa

SEQ ID NO: 4765 - DNA, 19 bp, Homo sapiens
aagcaacggagtagtgaaa

SEQ ID NO: 4766 - DNA, 19 bp, Homo sapiens
gaagcaacggagtagtgaa

SEQ ID NO: 4767 - DNA, 19 bp, Homo sapiens
agaagcaacggagtagtga

SEQ ID NO: 4768 - DNA, 19 bp, Homo sapiens
gagaagcaacggagtagtg

SEQ ID NO: 4769 - DNA, 19 bp, Homo sapiens
tgagaagcaacggagtagt

SEQ ID NO: 4770 - DNA, 19 bp, Homo sapiens
ttgagaagcaacggagtag

SEQ ID NO: 4771 - DNA, 19 bp, Homo sapiens
attgagaagcaacggagta

SEQ ID NO: 4772 - DNA, 19 bp, Homo sapiens
aattgagaagcaacggagt

SEQ ID NO: 4773 - DNA, 19 bp, Homo sapiens
gaattgagaagcaacggag

SEQ ID NO: 4774 - DNA, 19 bp, Homo sapiens
ggaattgagaagcaacgga

SEQ ID NO: 4775 - DNA, 19 bp, Homo sapiens
tggaattgagaagcaacgg

SEQ ID NO: 4776 - DNA, 19 bp, Homo sapiens
ttggaattgagaagcaacg

SEQ ID NO: 4777 - DNA, 19 bp, Homo sapiens
tttggaattgagaagcaac

SEQ ID NO: 4778 - DNA, 19 bp, Homo sapiens
atttggaattgagaagcaa

SEQ ID NO: 4779 - DNA, 19 bp, Homo sapiens
catttggaattgagaagca

SEQ ID NO: 4780 - DNA, 19 bp, Homo sapiens
gcatttggaattgagaagc

SEQ ID NO: 4781 - DNA, 19 bp, Homo sapiens
tgcatttggaattgagaag

SEQ ID NO: 4782 - DNA, 19 bp, Homo sapiens
gtgcatttggaattgagaa

SEQ ID NO: 4783 - DNA, 19 bp, Homo sapiens
ggtgcatttggaattgaga

SEQ ID NO: 4784 - DNA, 19 bp, Homo sapiens
gggtgcatttggaattgag

SEQ ID NO: 4785 - DNA, 19 bp, Homo sapiens
tgggtgcatttggaattga

SEQ ID NO: 4786 - DNA, 19 bp, Homo sapiens
ttgggtgcatttggaattg

SEQ ID NO: 4787 - DNA, 19 bp, Homo sapiens
gttgggtgcatttggaatt

SEQ ID NO: 4788 - DNA, 19 bp, Homo sapiens
ggttgggtgcatttggaat

SEQ ID NO: 4789 - DNA, 19 bp, Homo sapiens
gggttgggtgcatttggaa

SEQ ID NO: 4790 - DNA, 19 bp, Homo sapiens
ggggttgggtgcatttgga

SEQ ID NO: 4791 - DNA, 19 bp, Homo sapiens
aggggttgggtgcatttgg

SEQ ID NO: 4792 - DNA, 19 bp, Homo sapiens
caggggttgggtgcatttg

SEQ ID NO: 4793 - DNA, 19 bp, Homo sapiens
acaggggttgggtgcattt

SEQ ID NO: 4794 - DNA, 19 bp, Homo sapiens
cacaggggttgggtgcatt

SEQ ID NO: 4795 - DNA, 19 bp, Homo sapiens
tcacaggggttgggtgcat

SEQ ID NO: 4796 - DNA, 19 bp, Homo sapiens
ctcacaggggttgggtgca

SEQ ID NO: 4797 - DNA, 19 bp, Homo sapiens
tctcacaggggttgggtgc

SEQ ID NO: 4798 - DNA, 19 bp, Homo sapiens
ttctcacaggggttgggtg

SEQ ID NO: 4799 - DNA, 19 bp, Homo sapiens
attctcacaggggttgggt

SEQ ID NO: 4800 - DNA, 19 bp, Homo sapiens
aattctcacaggggttggg

SEQ ID NO: 4801 - DNA, 19 bp, Homo sapiens
gaattctcacaggggttgg

SEQ ID NO: 4802 - DNA, 19 bp, Homo sapiens
tgaattctcacaggggttg

SEQ ID NO: 4803 - DNA, 19 bp, Homo sapiens
ttgaattctcacaggggtt

SEQ ID NO: 4804 - DNA, 19 bp, Homo sapiens
cttgaattctcacaggggt

SEQ ID NO: 4805 - DNA, 19 bp, Homo sapiens
acttgaattctcacagggg

SEQ ID NO: 4806 - DNA, 19 bp, Homo sapiens
aacttgaattctcacaggg

SEQ ID NO: 4807 - DNA, 19 bp, Homo sapiens
caacttgaattctcacagg

SEQ ID NO: 4808 - DNA, 19 bp, Homo sapiens
acaacttgaattctcacag

SEQ ID NO: 4809 - DNA, 19 bp, Homo sapiens
aacaacttgaattctcaca

SEQ ID NO: 4810 - DNA, 19 bp, Homo sapiens
caacaacttgaattctcac

SEQ ID NO: 4811 - DNA, 19 bp, Homo sapiens
tcaacaacttgaattctca

SEQ ID NO: 4812 - DNA, 19 bp, Homo sapiens
atcaacaacttgaattctc

SEQ ID NO: 4813 - DNA, 19 bp, Homo sapiens
catcaacaacttgaattct

SEQ ID NO: 4814 - DNA, 19 bp, Homo sapiens
acatcaacaacttgaattc

SEQ ID NO: 4815 - DNA, 19 bp, Homo sapiens
cacatcaacaacttgaatt

SEQ ID NO: 4816 - DNA, 19 bp, Homo sapiens
tcacatcaacaacttgaat

SEQ ID NO: 4817 - DNA, 19 bp, Homo sapiens
ctcacatcaacaacttgaa

SEQ ID NO: 4818 - DNA, 19 bp, Homo sapiens
tctcacatcaacaacttga

SEQ ID NO: 4819 - DNA, 19 bp, Homo sapiens
ctctcacatcaacaacttg

SEQ ID NO: 4820 - DNA, 19 bp, Homo sapiens
tctctcacatcaacaactt

SEQ ID NO: 4821 - DNA, 19 bp, Homo sapiens
ttctctcacatcaacaact

SEQ ID NO: 4822 - DNA, 19 bp, Homo sapiens
cttctctcacatcaacaac

SEQ ID NO: 4823 - DNA, 19 bp, Homo sapiens
ccttctctcacatcaacaa

SEQ ID NO: 4824 - DNA, 19 bp, Homo sapiens
tccttctctcacatcaaca

SEQ ID NO: 4825 - DNA, 19 bp, Homo sapiens
gtccttctctcacatcaac

SEQ ID NO: 4826 - DNA, 19 bp, Homo sapiens
ggtccttctctcacatcaa

SEQ ID NO: 4827 - DNA, 19 bp, Homo sapiens
aggtccttctctcacatca

SEQ ID NO: 4828 - DNA, 19 bp, Homo sapiens
caggtccttctctcacatc

SEQ ID NO: 4829 - DNA, 19 bp, Homo sapiens
gcaggtccttctctcacat

SEQ ID NO: 4830 - DNA, 19 bp, Homo sapiens
tgcaggtccttctctcaca

SEQ ID NO: 4831 - DNA, 19 bp, Homo sapiens
atgcaggtccttctctcac

SEQ ID NO: 4832 - DNA, 19 bp, Homo sapiens
aatgcaggtccttctctca

SEQ ID NO: 4833 - DNA, 19 bp, Homo sapiens
aaatgcaggtccttctctc

SEQ ID NO: 4834 - DNA, 19 bp, Homo sapiens
gaaatgcaggtccttctct

SEQ ID NO: 4835 - DNA, 19 bp, Homo sapiens
tgaaatgcaggtccttctc

SEQ ID NO: 4836 - DNA, 19 bp, Homo sapiens
atgaaatgcaggtccttct

SEQ ID NO: 4837 - DNA, 19 bp, Homo sapiens
gatgaaatgcaggtccttc

SEQ ID NO: 4838 - DNA, 19 bp, Homo sapiens
ggatgaaatgcaggtcctt

SEQ ID NO: 4839 - DNA, 19 bp, Homo sapiens
tggatgaaatgcaggtcct

SEQ ID NO: 4840 - DNA, 19 bp, Homo sapiens
ttggatgaaatgcaggtcc

SEQ ID NO: 4841 - DNA, 19 bp, Homo sapiens
cttggatgaaatgcaggtc

SEQ ID NO: 4842 - DNA, 19 bp, Homo sapiens
acttggatgaaatgcaggt

SEQ ID NO: 4843 - DNA, 19 bp, Homo sapiens
tacttggatgaaatgcagg

SEQ ID NO: 4844 - DNA, 19 bp, Homo sapiens
gtacttggatgaaatgcag

SEQ ID NO: 4845 - DNA, 19 bp, Homo sapiens
agtacttggatgaaatgca

SEQ ID NO: 4846 - DNA, 19 bp, Homo sapiens
tagtacttggatgaaatgc

SEQ ID NO: 4847 - DNA, 19 bp, Homo sapiens
atagtacttggatgaaatg

SEQ ID NO: 4848 - DNA, 19 bp, Homo sapiens
catagtacttggatgaaat

SEQ ID NO: 4849 - DNA, 19 bp, Homo sapiens
ccatagtacttggatgaaa

SEQ ID NO: 4850 - DNA, 19 bp, Homo sapiens
gccatagtacttggatgaa

SEQ ID NO: 4851 - DNA, 19 bp, Homo sapiens
agccatagtacttggatga

SEQ ID NO: 4852 - DNA, 19 bp, Homo sapiens
aagccatagtacttggatg

SEQ ID NO: 4853 - DNA, 19 bp, Homo sapiens
aaagccatagtacttggat

SEQ ID NO: 4854 - DNA, 19 bp, Homo sapiens
aaaagccatagtacttgga

SEQ ID NO: 4855 - DNA, 19 bp, Homo sapiens
taaaagccatagtacttgg

SEQ ID NO: 4856 - DNA, 19 bp, Homo sapiens
ctaaaagccatagtacttg

SEQ ID NO: 4857 - DNA, 19 bp, Homo sapiens
actaaaagccatagtactt

SEQ ID NO: 4858 - DNA, 19 bp, Homo sapiens
cactaaaagccatagtact

SEQ ID NO: 4859 - DNA, 19 bp, Homo sapiens
acactaaaagccatagtac

SEQ ID NO: 4860 - DNA, 19 bp, Homo sapiens
cacactaaaagccatagta

SEQ ID NO: 4861 - DNA, 19 bp, Homo sapiens
gcacactaaaagccatagt

SEQ ID NO: 4862 - DNA, 19 bp, Homo sapiens
cgcacactaaaagccatag

SEQ ID NO: 4863 - DNA, 19 bp, Homo sapiens
ccgcacactaaaagccata

SEQ ID NO: 4864 - DNA, 19 bp, Homo sapiens
cccgcacactaaaagccat

SEQ ID NO: 4865 - DNA, 19 bp, Homo sapiens
tcccgcacactaaaagcca

SEQ ID NO: 4866 - DNA, 19 bp, Homo sapiens
ttcccgcacactaaaagcc

SEQ ID NO: 4867 - DNA, 19 bp, Homo sapiens
cttcccgcacactaaaagc

SEQ ID NO: 4868 - DNA, 19 bp, Homo sapiens
ccttcccgcacactaaaag

SEQ ID NO: 4869 - DNA, 19 bp, Homo sapiens
tccttcccgcacactaaaa

SEQ ID NO: 4870 - DNA, 19 bp, Homo sapiens
ttccttcccgcacactaaa

SEQ ID NO: 4871 - DNA, 19 bp, Homo sapiens
attccttcccgcacactaa

SEQ ID NO: 4872 - DNA, 19 bp, Homo sapiens
tattccttcccgcacacta

SEQ ID NO: 4873 - DNA, 19 bp, Homo sapiens
ttattccttcccgcacact

SEQ ID NO: 4874 - DNA, 19 bp, Homo sapiens
tttattccttcccgcacac

SEQ ID NO: 4875 - DNA, 19 bp, Homo sapiens
ttttattccttcccgcaca

SEQ ID NO: 4876 - DNA, 19 bp, Homo sapiens
cttttattccttcccgcac

SEQ ID NO: 4877 - DNA, 19 bp, Homo sapiens
ccttttattccttcccgca

SEQ ID NO: 4878 - DNA, 19 bp, Homo sapiens
tccttttattccttcccgc

SEQ ID NO: 4879 - DNA, 19 bp, Homo sapiens
ttccttttattccttcccg

SEQ ID NO: 4880 - DNA, 19 bp, Homo sapiens
cttccttttattccttccc

SEQ ID NO: 4881 - DNA, 19 bp, Homo sapiens
acttccttttattccttcc

SEQ ID NO: 4882 - DNA, 19 bp, Homo sapiens
aacttccttttattccttc

SEQ ID NO: 4883 - DNA, 19 bp, Homo sapiens
gaacttccttttattcctt

SEQ ID NO: 4884 - DNA, 19 bp, Homo sapiens
ggaacttccttttattcct

SEQ ID NO: 4885 - DNA, 19 bp, Homo sapiens
aggaacttccttttattcc

SEQ ID NO: 4886 - DNA, 19 bp, Homo sapiens
aaggaacttccttttattc

SEQ ID NO: 4887 - DNA, 19 bp, Homo sapiens
taaggaacttccttttatt

SEQ ID NO: 4888 - DNA, 19 bp, Homo sapiens
ataaggaacttccttttat

SEQ ID NO: 4889 - DNA, 19 bp, Homo sapiens
aataaggaacttcctttta

SEQ ID NO: 4890 - DNA, 19 bp, Homo sapiens
caataaggaacttcctttt

SEQ ID NO: 4891 - DNA, 19 bp, Homo sapiens
tcaataaggaacttccttt

SEQ ID NO: 4892 - DNA, 19 bp, Homo sapiens
ttcaataaggaacttcctt

SEQ ID NO: 4893 - DNA, 19 bp, Homo sapiens
attcaataaggaacttcct

SEQ ID NO: 4894 - DNA, 19 bp, Homo sapiens
aattcaataaggaacttcc

SEQ ID NO: 4895 - DNA, 19 bp, Homo sapiens
taattcaataaggaacttc

SEQ ID NO: 4896 - DNA, 19 bp, Homo sapiens
ataattcaataaggaactt

SEQ ID NO: 4897 - DNA, 19 bp, Homo sapiens
cataattcaataaggaact

SEQ ID NO: 4898 - DNA, 19 bp, Homo sapiens
acataattcaataaggaac

SEQ ID NO: 4899 - DNA, 19 bp, Homo sapiens
cacataattcaataaggaa

SEQ ID NO: 4900 - DNA, 19 bp, Homo sapiens
gcacataattcaataagga

SEQ ID NO: 4901 - DNA, 19 bp, Homo sapiens
agcacataattcaataagg

SEQ ID NO: 4902 - DNA, 19 bp, Homo sapiens
aagcacataattcaataag

SEQ ID NO: 4903 - DNA, 19 bp, Homo sapiens
caagcacataattcaataa

SEQ ID NO: 4904 - DNA, 19 bp, Homo sapiens
ccaagcacataattcaata

SEQ ID NO: 4905 - DNA, 19 bp, Homo sapiens
gccaagcacataattcaat

SEQ ID NO: 4906 - DNA, 19 bp, Homo sapiens
tgccaagcacataattcaa

SEQ ID NO: 4907 - DNA, 19 bp, Homo sapiens
gtgccaagcacataattca

SEQ ID NO: 4908 - DNA, 19 bp, Homo sapiens
tgtgccaagcacataattc

SEQ ID NO: 4909 - DNA, 19 bp, Homo sapiens
atgtgccaagcacataatt

SEQ ID NO: 4910 - DNA, 19 bp, Homo sapiens
tatgtgccaagcacataat

SEQ ID NO: 4911 - DNA, 19 bp, Homo sapiens
atatgtgccaagcacataa

SEQ ID NO: 4912 - DNA, 19 bp, Homo sapiens
tatatgtgccaagcacata

SEQ ID NO: 4913 - DNA, 19 bp, Homo sapiens
gtatatgtgccaagcacat

SEQ ID NO: 4914 - DNA, 19 bp, Homo sapiens
tgtatatgtgccaagcaca

SEQ ID NO: 4915 - DNA, 19 bp, Homo sapiens
ctgtatatgtgccaagcac

SEQ ID NO: 4916 - DNA, 19 bp, Homo sapiens
gctgtatatgtgccaagca

SEQ ID NO: 4917 - DNA, 19 bp, Homo sapiens
ggctgtatatgtgccaagc

SEQ ID NO: 4918 - DNA, 19 bp, Homo sapiens
tggctgtatatgtgccaag

SEQ ID NO: 4919 - DNA, 19 bp, Homo sapiens
atggctgtatatgtgccaa

SEQ ID NO: 4920 - DNA, 19 bp, Homo sapiens
tatggctgtatatgtgcca

SEQ ID NO: 4921 - DNA, 19 bp, Homo sapiens
ctatggctgtatatgtgcc

SEQ ID NO: 4922 - DNA, 19 bp, Homo sapiens
tctatggctgtatatgtgc

SEQ ID NO: 4923 - DNA, 19 bp, Homo sapiens
atctatggctgtatatgtg

SEQ ID NO: 4924 - DNA, 19 bp, Homo sapiens
aatctatggctgtatatgt

SEQ ID NO: 4925 - DNA, 19 bp, Homo sapiens
aaatctatggctgtatatg

SEQ ID NO: 4926 - DNA, 19 bp, Homo sapiens
caaatctatggctgtatat

SEQ ID NO: 4927 - DNA, 19 bp, Homo sapiens
ccaaatctatggctgtata

SEQ ID NO: 4928 - DNA, 19 bp, Homo sapiens
tccaaatctatggctgtat

SEQ ID NO: 4929 - DNA, 19 bp, Homo sapiens
gtccaaatctatggctgta

SEQ ID NO: 4930 - DNA, 19 bp, Homo sapiens
tgtccaaatctatggctgt

SEQ ID NO: 4931 - DNA, 19 bp, Homo sapiens
gtgtccaaatctatggctg

SEQ ID NO: 4932 - DNA, 19 bp, Homo sapiens
tgtgtccaaatctatggct

SEQ ID NO: 4933 - DNA, 19 bp, Homo sapiens
ctgtgtccaaatctatggc

SEQ ID NO: 4934 - DNA, 19 bp, Homo sapiens
cctgtgtccaaatctatgg

SEQ ID NO: 4935 - DNA, 19 bp, Homo sapiens
tcctgtgtccaaatctatg

SEQ ID NO: 4936 - DNA, 19 bp, Homo sapiens
ttcctgtgtccaaatctat

SEQ ID NO: 4937 - DNA, 19 bp, Homo sapiens
tttcctgtgtccaaatcta

SEQ ID NO: 4938 - DNA, 19 bp, Homo sapiens
gtttcctgtgtccaaatct

SEQ ID NO: 4939 - DNA, 19 bp, Homo sapiens
ggtttcctgtgtccaaatc

SEQ ID NO: 4940 - DNA, 19 bp, Homo sapiens
gggtttcctgtgtccaaat

SEQ ID NO: 4941 - DNA, 19 bp, Homo sapiens
agggtttcctgtgtccaaa

SEQ ID NO: 4942 - DNA, 19 bp, Homo sapiens
cagggtttcctgtgtccaa

SEQ ID NO: 4943 - DNA, 19 bp, Homo sapiens
gcagggtttcctgtgtcca

SEQ ID NO: 4944 - DNA, 19 bp, Homo sapiens
tgcagggtttcctgtgtcc

SEQ ID NO: 4945 - DNA, 19 bp, Homo sapiens
ttgcagggtttcctgtgtc

SEQ ID NO: 4946 - DNA, 19 bp, Homo sapiens
gttgcagggtttcctgtgt

SEQ ID NO: 4947 - DNA, 19 bp, Homo sapiens
tgttgcagggtttcctgtg

SEQ ID NO: 4948 - DNA, 19 bp, Homo sapiens
ctgttgcagggtttcctgt

SEQ ID NO: 4949 - DNA, 19 bp, Homo sapiens
tctgttgcagggtttcctg

SEQ ID NO: 4950 - DNA, 19 bp, Homo sapiens
atctgttgcagggtttcct

SEQ ID NO: 4951 - DNA, 19 bp, Homo sapiens
catctgttgcagggtttcc

SEQ ID NO: 4952 - DNA, 19 bp, Homo sapiens
acatctgttgcagggtttc

SEQ ID NO: 4953 - DNA, 19 bp, Homo sapiens
gacatctgttgcagggttt

SEQ ID NO: 4954 - DNA, 19 bp, Homo sapiens
tgacatctgttgcagggtt

SEQ ID NO: 4955 - DNA, 19 bp, Homo sapiens
ctgacatctgttgcagggt

SEQ ID NO: 4956 - DNA, 19 bp, Homo sapiens
tctgacatctgttgcaggg

SEQ ID NO: 4957 - DNA, 19 bp, Homo sapiens
atctgacatctgttgcagg

SEQ ID NO: 4958 - DNA, 19 bp, Homo sapiens
tatctgacatctgttgcag

SEQ ID NO: 4959 - DNA, 19 bp, Homo sapiens
atatctgacatctgttgca

SEQ ID NO: 4960 - DNA, 19 bp, Homo sapiens
tatatctgacatctgttgc

SEQ ID NO: 4961 - DNA, 19 bp, Homo sapiens
atatatctgacatctgttg

SEQ ID NO: 4962 - DNA, 19 bp, Homo sapiens
gatatatctgacatctgtt

SEQ ID NO: 4963 - DNA, 19 bp, Homo sapiens
tgatatatctgacatctgt

SEQ ID NO: 4964 - DNA, 19 bp, Homo sapiens
atgatatatctgacatctg

SEQ ID NO: 4965 - DNA, 19 bp, Homo sapiens
tatgatatatctgacatct

SEQ ID NO: 4966 - DNA, 19 bp, Homo sapiens
ctatgatatatctgacatc

SEQ ID NO: 4967 - DNA, 19 bp, Homo sapiens
cctatgatatatctgacat

SEQ ID NO: 4968 - DNA, 19 bp, Homo sapiens
ccctatgatatatctgaca

SEQ ID NO: 4969 - DNA, 19 bp, Homo sapiens
gccctatgatatatctgac

SEQ ID NO: 4970 - DNA, 19 bp, Homo sapiens
tgccctatgatatatctga

SEQ ID NO: 4971 - DNA, 19 bp, Homo sapiens
atgccctatgatatatctg

SEQ ID NO: 4972 - DNA, 19 bp, Homo sapiens
catgccctatgatatatct

SEQ ID NO: 4973 - DNA, 19 bp, Homo sapiens
tcatgccctatgatatatc

SEQ ID NO: 4974 - DNA, 19 bp, Homo sapiens
atcatgccctatgatatat

SEQ ID NO: 4975 - DNA, 19 bp, Homo sapiens
catcatgccctatgatata

SEQ ID NO: 4976 - DNA, 19 bp, Homo sapiens
gcatcatgccctatgatat

SEQ ID NO: 4977 - DNA, 19 bp, Homo sapiens
tgcatcatgccctatgata

SEQ ID NO: 4978 - DNA, 19 bp, Homo sapiens
ctgcatcatgccctatgat

SEQ ID NO: 4979 - DNA, 19 bp, Homo sapiens
cctgcatcatgccctatga

SEQ ID NO: 4980 - DNA, 19 bp, Homo sapiens
gcctgcatcatgccctatg

SEQ ID NO: 4981 - DNA, 19 bp, Homo sapiens
tgcctgcatcatgccctat

SEQ ID NO: 4982 - DNA, 19 bp, Homo sapiens
ctgcctgcatcatgcccta

SEQ ID NO: 4983 - DNA, 19 bp, Homo sapiens
gctgcctgcatcatgccct

SEQ ID NO: 4984 - DNA, 19 bp, Homo sapiens
agctgcctgcatcatgccc

SEQ ID NO: 4985 - DNA, 19 bp, Homo sapiens
cagctgcctgcatcatgcc

SEQ ID NO: 4986 - DNA, 19 bp, Homo sapiens
ccagctgcctgcatcatgc

SEQ ID NO: 4987 - DNA, 19 bp, Homo sapiens
accagctgcctgcatcatg

SEQ ID NO: 4988 - DNA, 19 bp, Homo sapiens
aaccagctgcctgcatcat

SEQ ID NO: 4989 - DNA, 19 bp, Homo sapiens
taaccagctgcctgcatca

SEQ ID NO: 4990 - DNA, 19 bp, Homo sapiens
ttaaccagctgcctgcatc

SEQ ID NO: 4991 - DNA, 19 bp, Homo sapiens
tttaaccagctgcctgcat

SEQ ID NO: 4992 - DNA, 19 bp, Homo sapiens
ttttaaccagctgcctgca

SEQ ID NO: 4993 - DNA, 19 bp, Homo sapiens
tttttaaccagctgcctgc

SEQ ID NO: 4994 - DNA, 19 bp, Homo sapiens
atttttaaccagctgcctg

SEQ ID NO: 4995 - DNA, 19 bp, Homo sapiens
aatttttaaccagctgcct

SEQ ID NO: 4996 - DNA, 19 bp, Homo sapiens
caatttttaaccagctgcc

SEQ ID NO: 4997 - DNA, 19 bp, Homo sapiens
tcaatttttaaccagctgc

SEQ ID NO: 4998 - DNA, 19 bp, Homo sapiens
atcaatttttaaccagctg

SEQ ID NO: 4999 - DNA, 19 bp, Homo sapiens
aatcaatttttaaccagct

SEQ ID NO: 5000 - DNA, 19 bp, Homo sapiens
gaatcaatttttaaccagc

SEQ ID NO: 5001 - DNA, 19 bp, Homo sapiens
tgaatcaatttttaaccag

SEQ ID NO: 5002 - DNA, 19 bp, Homo sapiens
ttgaatcaatttttaacca

SEQ ID NO: 5003 - DNA, 19 bp, Homo sapiens
cttgaatcaatttttaacc

SEQ ID NO: 5004 - DNA, 19 bp, Homo sapiens
tcttgaatcaatttttaac

SEQ ID NO: 5005 - DNA, 19 bp, Homo sapiens
ttcttgaatcaatttttaa

SEQ ID NO: 5006 - DNA, 19 bp, Homo sapiens
gttcttgaatcaattttta

SEQ ID NO: 5007 - DNA, 19 bp, Homo sapiens
agttcttgaatcaattttt

SEQ ID NO: 5008 - DNA, 19 bp, Homo sapiens
cagttcttgaatcaatttt

SEQ ID NO: 5009 - DNA, 19 bp, Homo sapiens
ccagttcttgaatcaattt

SEQ ID NO: 5010 - DNA, 19 bp, Homo sapiens
accagttcttgaatcaatt

SEQ ID NO: 5011 - DNA, 19 bp, Homo sapiens
caccagttcttgaatcaat

SEQ ID NO: 5012 - DNA, 19 bp, Homo sapiens
tcaccagttcttgaatcaa

SEQ ID NO: 5013 - DNA, 19 bp, Homo sapiens
ctcaccagttcttgaatca

SEQ ID NO: 5014 - DNA, 19 bp, Homo sapiens
tctcaccagttcttgaatc

SEQ ID NO: 5015 - DNA, 19 bp, Homo sapiens
atctcaccagttcttgaat

SEQ ID NO: 5016 - DNA, 19 bp, Homo sapiens
tatctcaccagttcttgaa

SEQ ID NO: 5017 - DNA, 19 bp, Homo sapiens
gtatctcaccagttcttga

SEQ ID NO: 5018 - DNA, 19 bp, Homo sapiens
tgtatctcaccagttcttg

SEQ ID NO: 5019 - DNA, 19 bp, Homo sapiens
ttgtatctcaccagttctt

SEQ ID NO: 5020 - DNA, 19 bp, Homo sapiens
attgtatctcaccagttct

SEQ ID NO: 5021 - DNA, 19 bp, Homo sapiens
aattgtatctcaccagttc

SEQ ID NO: 5022 - DNA, 19 bp, Homo sapiens
aaattgtatctcaccagtt

SEQ ID NO: 5023 - DNA, 19 bp, Homo sapiens
aaaattgtatctcaccagt

SEQ ID NO: 5024 - DNA, 19 bp, Homo sapiens
gaaaattgtatctcaccag

SEQ ID NO: 5025 - DNA, 19 bp, Homo sapiens
agaaaattgtatctcacca

SEQ ID NO: 5026 - DNA, 19 bp, Homo sapiens
tagaaaattgtatctcacc

SEQ ID NO: 5027 - DNA, 19 bp, Homo sapiens
ctagaaaattgtatctcac

SEQ ID NO: 5028 - DNA, 19 bp, Homo sapiens
tctagaaaattgtatctca

SEQ ID NO: 5029 - DNA, 19 bp, Homo sapiens
ctctagaaaattgtatctc

SEQ ID NO: 5030 - DNA, 19 bp, Homo sapiens
tctctagaaaattgtatct

SEQ ID NO: 5031 - DNA, 19 bp, Homo sapiens
ttctctagaaaattgtatc

SEQ ID NO: 5032 - DNA, 19 bp, Homo sapiens
attctctagaaaattgtat

SEQ ID NO: 5033 - DNA, 19 bp, Homo sapiens
aattctctagaaaattgta

SEQ ID NO: 5034 - DNA, 19 bp, Homo sapiens
aaattctctagaaaattgt

SEQ ID NO: 5035 - DNA, 19 bp, Homo sapiens
caaattctctagaaaattg

SEQ ID NO: 5036 - DNA, 19 bp, Homo sapiens
tcaaattctctagaaaatt

SEQ ID NO: 5037 - DNA, 19 bp, Homo sapiens
atcaaattctctagaaaat

SEQ ID NO: 5038 - DNA, 19 bp, Homo sapiens
tatcaaattctctagaaaa

SEQ ID NO: 5039 - DNA, 19 bp, Homo sapiens
ttatcaaattctctagaaa

SEQ ID NO: 5040 - DNA, 19 bp, Homo sapiens
cttatcaaattctctagaa

SEQ ID NO: 5041 - DNA, 19 bp, Homo sapiens
tcttatcaaattctctaga

SEQ ID NO: 5042 - DNA, 19 bp, Homo sapiens
ttcttatcaaattctctag

SEQ ID NO: 5043 - DNA, 19 bp, Homo sapiens
cttcttatcaaattctcta

SEQ ID NO: 5044 - DNA, 19 bp, Homo sapiens
acttcttatcaaattctct

SEQ ID NO: 5045 - DNA, 19 bp, Homo sapiens
gacttcttatcaaattctc

SEQ ID NO: 5046 - DNA, 19 bp, Homo sapiens
tgacttcttatcaaattct

SEQ ID NO: 5047 - DNA, 19 bp, Homo sapiens
ttgacttcttatcaaattc

SEQ ID NO: 5048 - DNA, 19 bp, Homo sapiens
tttgacttcttatcaaatt

SEQ ID NO: 5049 - DNA, 19 bp, Homo sapiens
ttttgacttcttatcaaat

SEQ ID NO: 5050 - DNA, 19 bp, Homo sapiens
attttgacttcttatcaaa

SEQ ID NO: 5051 - DNA, 19 bp, Homo sapiens
tattttgacttcttatcaa

SEQ ID NO: 5052 - DNA, 19 bp, Homo sapiens
atattttgacttcttatca

SEQ ID NO: 5053 - DNA, 19 bp, Homo sapiens
tatattttgacttcttatc

SEQ ID NO: 5054 - DNA, 19 bp, Homo sapiens
atatattttgacttcttat

SEQ ID NO: 5055 - DNA, 19 bp, Homo sapiens
aatatattttgacttctta

SEQ ID NO: 5056 - DNA, 19 bp, Homo sapiens
taatatattttgacttctt

SEQ ID NO: 5057 - DNA, 19 bp, Homo sapiens
ataatatattttgacttct

SEQ ID NO: 5058 - DNA, 19 bp, Homo sapiens
gataatatattttgacttc

SEQ ID NO: 5059 - DNA, 19 bp, Homo sapiens
tgataatatattttgactt

SEQ ID NO: 5060 - DNA, 19 bp, Homo sapiens
ttgataatatattttgact

SEQ ID NO: 5061 - DNA, 19 bp, Homo sapiens
attgataatatattttgac

SEQ ID NO: 5062 - DNA, 19 bp, Homo sapiens
cattgataatatattttga

SEQ ID NO: 5063 - DNA, 19 bp, Homo sapiens
ccattgataatatattttg

SEQ ID NO: 5064 - DNA, 19 bp, Homo sapiens
cccattgataatatatttt

SEQ ID NO: 5065 - DNA, 19 bp, Homo sapiens
tcccattgataatatattt

SEQ ID NO: 5066 - DNA, 19 bp, Homo sapiens
atcccattgataatatatt

SEQ ID NO: 5067 - DNA, 19 bp, Homo sapiens
tatcccattgataatatat

SEQ ID NO: 5068 - DNA, 19 bp, Homo sapiens
atatcccattgataatata

SEQ ID NO: 5069 - DNA, 19 bp, Homo sapiens
tatatcccattgataatat

SEQ ID NO: 5070 - DNA, 19 bp, Homo sapiens
gtatatcccattgataata

SEQ ID NO: 5071 - DNA, 19 bp, Homo sapiens
tgtatatcccattgataat

SEQ ID NO: 5072 - DNA, 19 bp, Homo sapiens
gtgtatatcccattgataa

SEQ ID NO: 5073 - DNA, 19 bp, Homo sapiens
tgtgtatatcccattgata

SEQ ID NO: 5074 - DNA, 19 bp, Homo sapiens
ctgtgtatatcccattgat

SEQ ID NO: 5075 - DNA, 19 bp, Homo sapiens
gctgtgtatatcccattga

SEQ ID NO: 5076 - DNA, 19 bp, Homo sapiens
tgctgtgtatatcccattg

SEQ ID NO: 5077 - DNA, 19 bp, Homo sapiens
ctgctgtgtatatcccatt

SEQ ID NO: 5078 - DNA, 19 bp, Homo sapiens
tctgctgtgtatatcccat

SEQ ID NO: 5079 - DNA, 19 bp, Homo sapiens
ctctgctgtgtatatccca

SEQ ID NO: 5080 - DNA, 19 bp, Homo sapiens
tctctgctgtgtatatccc

SEQ ID NO: 5081 - DNA, 19 bp, Homo sapiens
atctctgctgtgtatatcc

SEQ ID NO: 5082 - DNA, 19 bp, Homo sapiens
gatctctgctgtgtatatc

SEQ ID NO: 5083 - DNA, 19 bp, Homo sapiens
ggatctctgctgtgtatat

SEQ ID NO: 5084 - DNA, 19 bp, Homo sapiens
aggatctctgctgtgtata

SEQ ID NO: 5085 - DNA, 19 bp, Homo sapiens
caggatctctgctgtgtat

SEQ ID NO: 5086 - DNA, 19 bp, Homo sapiens
ccaggatctctgctgtgta

SEQ ID NO: 5087 - DNA, 19 bp, Homo sapiens
gccaggatctctgctgtgt

SEQ ID NO: 5088 - DNA, 19 bp, Homo sapiens
agccaggatctctgctgtg

SEQ ID NO: 5089 - DNA, 19 bp, Homo sapiens
tagccaggatctctgctgt

SEQ ID NO: 5090 - DNA, 19 bp, Homo sapiens
atagccaggatctctgctg

SEQ ID NO: 5091 - DNA, 19 bp, Homo sapiens
tatagccaggatctctgct

SEQ ID NO: 5092 - DNA, 19 bp, Homo sapiens
ctatagccaggatctctgc

SEQ ID NO: 5093 - DNA, 19 bp, Homo sapiens
tctatagccaggatctctg

SEQ ID NO: 5094 - DNA, 19 bp, Homo sapiens
atctatagccaggatctct

SEQ ID NO: 5095 - DNA, 19 bp, Homo sapiens
catctatagccaggatctc

SEQ ID NO: 5096 - DNA, 19 bp, Homo sapiens
tcatctatagccaggatct

SEQ ID NO: 5097 - DNA, 19 bp, Homo sapiens
atcatctatagccaggatc

SEQ ID NO: 5098 - DNA, 19 bp, Homo sapiens
catcatctatagccaggat

SEQ ID NO: 5099 - DNA, 19 bp, Homo sapiens
ccatcatctatagccagga

SEQ ID NO: 5100 - DNA, 19 bp, Homo sapiens
gccatcatctatagccagg

SEQ ID NO: 5101 - DNA, 19 bp, Homo sapiens
agccatcatctatagccag

SEQ ID NO: 5102 - DNA, 19 bp, Homo sapiens
gagccatcatctatagcca

SEQ ID NO: 5103 - DNA, 19 bp, Homo sapiens
agagccatcatctatagcc

SEQ ID NO: 5104 - DNA, 19 bp, Homo sapiens
cagagccatcatctatagc

SEQ ID NO: 5105 - DNA, 19 bp, Homo sapiens
ccagagccatcatctatag

SEQ ID NO: 5106 - DNA, 19 bp, Homo sapiens
tccagagccatcatctata

SEQ ID NO: 5107 - DNA, 19 bp, Homo sapiens
ttccagagccatcatctat

SEQ ID NO: 5108 - DNA, 19 bp, Homo sapiens
tttccagagccatcatcta

SEQ ID NO: 5109 - DNA, 19 bp, Homo sapiens
ttttccagagccatcatct

SEQ ID NO: 5110 - DNA, 19 bp, Homo sapiens
tttttccagagccatcatc

SEQ ID NO: 5111 - DNA, 19 bp, Homo sapiens
gtttttccagagccatcat

SEQ ID NO: 5112 - DNA, 19 bp, Homo sapiens
tgtttttccagagccatca

SEQ ID NO: 5113 - DNA, 19 bp, Homo sapiens
ctgtttttccagagccatc

SEQ ID NO: 5114 - DNA, 19 bp, Homo sapiens
gctgtttttccagagccat

SEQ ID NO: 5115 - DNA, 19 bp, Homo sapiens
agctgtttttccagagcca

SEQ ID NO: 5116 - DNA, 19 bp, Homo sapiens
tagctgtttttccagagcc

SEQ ID NO: 5117 - DNA, 19 bp, Homo sapiens
gtagctgtttttccagagc

SEQ ID NO: 5118 - DNA, 19 bp, Homo sapiens
tgtagctgtttttccagag

SEQ ID NO: 5119 - DNA, 19 bp, Homo sapiens
ctgtagctgtttttccaga

SEQ ID NO: 5120 - DNA, 19 bp, Homo sapiens
cctgtagctgtttttccag

SEQ ID NO: 5121 - DNA, 19 bp, Homo sapiens
tcctgtagctgtttttcca

SEQ ID NO: 5122 - DNA, 19 bp, Homo sapiens
ttcctgtagctgtttttcc

SEQ ID NO: 5123 - DNA, 19 bp, Homo sapiens
gttcctgtagctgtttttc

SEQ ID NO: 5124 - DNA, 19 bp, Homo sapiens
ggttcctgtagctgttttt

SEQ ID NO: 5125 - DNA, 19 bp, Homo sapiens
tggttcctgtagctgtttt

SEQ ID NO: 5126 - DNA, 19 bp, Homo sapiens
atggttcctgtagctgttt

SEQ ID NO: 5127 - DNA, 19 bp, Homo sapiens
tatggttcctgtagctgtt

SEQ ID NO: 5128 - DNA, 19 bp, Homo sapiens
atatggttcctgtagctgt

SEQ ID NO: 5129 - DNA, 19 bp, Homo sapiens
catatggttcctgtagctg

SEQ ID NO: 5130 - DNA, 19 bp, Homo sapiens
acatatggttcctgtagct

SEQ ID NO: 5131 - DNA, 19 bp, Homo sapiens
tacatatggttcctgtagc

SEQ ID NO: 5132 - DNA, 19 bp, Homo sapiens
atacatatggttcctgtag

SEQ ID NO: 5133 - DNA, 19 bp, Homo sapiens
aatacatatggttcctgta

SEQ ID NO: 5134 - DNA, 19 bp, Homo sapiens
caatacatatggttcctgt

SEQ ID NO: 5135 - DNA, 19 bp, Homo sapiens
tcaatacatatggttcctg

SEQ ID NO: 5136 - DNA, 19 bp, Homo sapiens
ctcaatacatatggttcct

SEQ ID NO: 5137 - DNA, 19 bp, Homo sapiens
cctcaatacatatggttcc

SEQ ID NO: 5138 - DNA, 19 bp, Homo sapiens
acctcaatacatatggttc

SEQ ID NO: 5139 - DNA, 19 bp, Homo sapiens
aacctcaatacatatggtt

SEQ ID NO: 5140 - DNA, 19 bp, Homo sapiens
gaacctcaatacatatggt

SEQ ID NO: 5141 - DNA, 19 bp, Homo sapiens
ggaacctcaatacatatgg

SEQ ID NO: 5142 - DNA, 19 bp, Homo sapiens
aggaacctcaatacatatg

SEQ ID NO: 5143 - DNA, 19 bp, Homo sapiens
caggaacctcaatacatat

SEQ ID NO: 5144 - DNA, 19 bp, Homo sapiens
tcaggaacctcaatacata

SEQ ID NO: 5145 - DNA, 19 bp, Homo sapiens
atcaggaacctcaatacat

SEQ ID NO: 5146 - DNA, 19 bp, Homo sapiens
tatcaggaacctcaataca

SEQ ID NO: 5147 - DNA, 19 bp, Homo sapiens
atatcaggaacctcaatac

SEQ ID NO: 5148 - DNA, 19 bp, Homo sapiens
gatatcaggaacctcaata

SEQ ID NO: 5149 - DNA, 19 bp, Homo sapiens
tgatatcaggaacctcaat

SEQ ID NO: 5150 - DNA, 19 bp, Homo sapiens
ttgatatcaggaacctcaa

SEQ ID NO: 5151 - DNA, 19 bp, Homo sapiens
attgatatcaggaacctca

SEQ ID NO: 5152 - DNA, 19 bp, Homo sapiens
cattgatatcaggaacctc

SEQ ID NO: 5153 - DNA, 19 bp, Homo sapiens
tcattgatatcaggaacct

SEQ ID NO: 5154 - DNA, 19 bp, Homo sapiens
atcattgatatcaggaacc

SEQ ID NO: 5155 - DNA, 19 bp, Homo sapiens
aatcattgatatcaggaac

SEQ ID NO: 5156 - DNA, 19 bp, Homo sapiens
taatcattgatatcaggaa

SEQ ID NO: 5157 - DNA, 19 bp, Homo sapiens
ataatcattgatatcagga

SEQ ID NO: 5158 - DNA, 19 bp, Homo sapiens
aataatcattgatatcagg

SEQ ID NO: 5159 - DNA, 19 bp, Homo sapiens
caataatcattgatatcag

SEQ ID NO: 5160 - DNA, 19 bp, Homo sapiens
acaataatcattgatatca

SEQ ID NO: 5161 - DNA, 19 bp, Homo sapiens
gacaataatcattgatatc

SEQ ID NO: 5162 - DNA, 19 bp, Homo sapiens
ggacaataatcattgatat

SEQ ID NO: 5163 - DNA, 19 bp, Homo sapiens
tggacaataatcattgata

SEQ ID NO: 5164 - DNA, 19 bp, Homo sapiens
ttggacaataatcattgat

SEQ ID NO: 5165 - DNA, 19 bp, Homo sapiens
tttggacaataatcattga

SEQ ID NO: 5166 - DNA, 19 bp, Homo sapiens
gtttggacaataatcattg

SEQ ID NO: 5167 - DNA, 19 bp, Homo sapiens
tgtttggacaataatcatt

SEQ ID NO: 5168 - DNA, 19 bp, Homo sapiens
atgtttggacaataatcat

SEQ ID NO: 5169 - DNA, 19 bp, Homo sapiens
aatgtttggacaataatca

SEQ ID NO: 5170 - DNA, 19 bp, Homo sapiens
aaatgtttggacaataatc

SEQ ID NO: 5171 - DNA, 19 bp, Homo sapiens
aaaatgtttggacaataat

SEQ ID NO: 5172 - DNA, 19 bp, Homo sapiens
aaaaatgtttggacaataa

SEQ ID NO: 5173 - DNA, 19 bp, Homo sapiens
gaaaaatgtttggacaata

SEQ ID NO: 5174 - DNA, 19 bp, Homo sapiens
ggaaaaatgtttggacaat

SEQ ID NO: 5175 - DNA, 19 bp, Homo sapiens
aggaaaaatgtttggacaa

SEQ ID NO: 5176 - DNA, 19 bp, Homo sapiens
caggaaaaatgtttggaca

SEQ ID NO: 5177 - DNA, 19 bp, Homo sapiens
tcaggaaaaatgtttggac

SEQ ID NO: 5178 - DNA, 19 bp, Homo sapiens
ttcaggaaaaatgtttgga

SEQ ID NO: 5179 - DNA, 19 bp, Homo sapiens
tttcaggaaaaatgtttgg

SEQ ID NO: 5180 - DNA, 19 bp, Homo sapiens
ctttcaggaaaaatgtttg

SEQ ID NO: 5181 - DNA, 19 bp, Homo sapiens
tctttcaggaaaaatgttt

SEQ ID NO: 5182 - DNA, 19 bp, Homo sapiens
ttctttcaggaaaaatgtt

SEQ ID NO: 5183 - DNA, 19 bp, Homo sapiens
cttctttcaggaaaaatgt

SEQ ID NO: 5184 - DNA, 19 bp, Homo sapiens
tcttctttcaggaaaaatg

SEQ ID NO: 5185 - DNA, 19 bp, Homo sapiens
ttcttctttcaggaaaaat

SEQ ID NO: 5186 - DNA, 19 bp, Homo sapiens
gttcttctttcaggaaaaa

SEQ ID NO: 5187 - DNA, 19 bp, Homo sapiens
ggttcttctttcaggaaaa

SEQ ID NO: 5188 - DNA, 19 bp, Homo sapiens
tggttcttctttcaggaaa

SEQ ID NO: 5189 - DNA, 19 bp, Homo sapiens
atggttcttctttcaggaa

SEQ ID NO: 5190 - DNA, 19 bp, Homo sapiens
gatggttcttctttcagga

SEQ ID NO: 5191 - DNA, 19 bp, Homo sapiens
agatggttcttctttcagg

SEQ ID NO: 5192 - DNA, 19 bp, Homo sapiens
cagatggttcttctttcag

SEQ ID NO: 5193 - DNA, 19 bp, Homo sapiens
gcagatggttcttctttca

SEQ ID NO: 5194 - DNA, 19 bp, Homo sapiens
tgcagatggttcttctttc

SEQ ID NO: 5195 - DNA, 19 bp, Homo sapiens
atgcagatggttcttcttt

SEQ ID NO: 5196 - DNA, 19 bp, Homo sapiens
aatgcagatggttcttctt

SEQ ID NO: 5197 - DNA, 19 bp, Homo sapiens
caatgcagatggttcttct

SEQ ID NO: 5198 - DNA, 19 bp, Homo sapiens
tcaatgcagatggttcttc

SEQ ID NO: 5199 - DNA, 19 bp, Homo sapiens
gtcaatgcagatggttctt

SEQ ID NO: 5200 - DNA, 19 bp, Homo sapiens
agtcaatgcagatggttct

SEQ ID NO: 5201 - DNA, 19 bp, Homo sapiens
gagtcaatgcagatggttc

SEQ ID NO: 5202 - DNA, 19 bp, Homo sapiens
agagtcaatgcagatggtt

SEQ ID NO: 5203 - DNA, 19 bp, Homo sapiens
gagagtcaatgcagatggt

SEQ ID NO: 5204 - DNA, 19 bp, Homo sapiens
ggagagtcaatgcagatgg

SEQ ID NO: 5205 - DNA, 19 bp, Homo sapiens
tggagagtcaatgcagatg

SEQ ID NO: 5206 - DNA, 19 bp, Homo sapiens
atggagagtcaatgcagat

SEQ ID NO: 5207 - DNA, 19 bp, Homo sapiens
gatggagagtcaatgcaga

SEQ ID NO: 5208 - DNA, 19 bp, Homo sapiens
tgatggagagtcaatgcag

SEQ ID NO: 5209 - DNA, 19 bp, Homo sapiens
ctgatggagagtcaatgca

SEQ ID NO: 5210 - DNA, 19 bp, Homo sapiens
actgatggagagtcaatgc

SEQ ID NO: 5211 - DNA, 19 bp, Homo sapiens
gactgatggagagtcaatg

SEQ ID NO: 5212 - DNA, 19 bp, Homo sapiens
ggactgatggagagtcaat

SEQ ID NO: 5213 - DNA, 19 bp, Homo sapiens
aggactgatggagagtcaa

SEQ ID NO: 5214 - DNA, 19 bp, Homo sapiens
aaggactgatggagagtca

SEQ ID NO: 5215 - DNA, 19 bp, Homo sapiens
taaggactgatggagagtc

SEQ ID NO: 5216 - DNA, 19 bp, Homo sapiens
ataaggactgatggagagt

SEQ ID NO: 5217 - DNA, 19 bp, Homo sapiens
gataaggactgatggagag

SEQ ID NO: 5218 - DNA, 19 bp, Homo sapiens
agataaggactgatggaga

SEQ ID NO: 5219 - DNA, 19 bp, Homo sapiens
gagataaggactgatggag

SEQ ID NO: 5220 - DNA, 19 bp, Homo sapiens
agagataaggactgatgga

SEQ ID NO: 5221 - DNA, 19 bp, Homo sapiens
cagagataaggactgatgg

SEQ ID NO: 5222 - DNA, 19 bp, Homo sapiens
acagagataaggactgatg

SEQ ID NO: 5223 - DNA, 19 bp, Homo sapiens
aacagagataaggactgat

SEQ ID NO: 5224 - DNA, 19 bp, Homo sapiens
taacagagataaggactga

SEQ ID NO: 5225 - DNA, 19 bp, Homo sapiens
ttaacagagataaggactg

SEQ ID NO: 5226 - DNA, 19 bp, Homo sapiens
attaacagagataaggact

SEQ ID NO: 5227 - DNA, 19 bp, Homo sapiens
cattaacagagataaggac

SEQ ID NO: 5228 - DNA, 19 bp, Homo sapiens
tcattaacagagataagga

SEQ ID NO: 5229 - DNA, 19 bp, Homo sapiens
ttcattaacagagataagg

SEQ ID NO: 5230 - DNA, 19 bp, Homo sapiens
gttcattaacagagataag

SEQ ID NO: 5231 - DNA, 19 bp, Homo sapiens
tgttcattaacagagataa

SEQ ID NO: 5232 - DNA, 19 bp, Homo sapiens
atgttcattaacagagata

SEQ ID NO: 5233 - DNA, 19 bp, Homo sapiens
aatgttcattaacagagat

SEQ ID NO: 5234 - DNA, 19 bp, Homo sapiens
gaatgttcattaacagaga

SEQ ID NO: 5235 - DNA, 19 bp, Homo sapiens
agaatgttcattaacagag

SEQ ID NO: 5236 - DNA, 19 bp, Homo sapiens
aagaatgttcattaacaga

SEQ ID NO: 5237 - DNA, 19 bp, Homo sapiens
taagaatgttcattaacag

SEQ ID NO: 5238 - DNA, 19 bp, Homo sapiens
ataagaatgttcattaaca

SEQ ID NO: 5239 - DNA, 19 bp, Homo sapiens
cataagaatgttcattaac

SEQ ID NO: 5240 - DNA, 19 bp, Homo sapiens
ccataagaatgttcattaa

SEQ ID NO: 5241 - DNA, 19 bp, Homo sapiens
cccataagaatgttcatta

SEQ ID NO: 5242 - DNA, 19 bp, Homo sapiens
acccataagaatgttcatt

SEQ ID NO: 5243 - DNA, 19 bp, Homo sapiens
gacccataagaatgttcat

SEQ ID NO: 5244 - DNA, 19 bp, Homo sapiens
agacccataagaatgttca

SEQ ID NO: 5245 - DNA, 19 bp, Homo sapiens
gagacccataagaatgttc

SEQ ID NO: 5246 - DNA, 19 bp, Homo sapiens
ggagacccataagaatgtt

SEQ ID NO: 5247 - DNA, 19 bp, Homo sapiens
cggagacccataagaatgt

SEQ ID NO: 5248 - DNA, 19 bp, Homo sapiens
acggagacccataagaatg

SEQ ID NO: 5249 - DNA, 19 bp, Homo sapiens
aacggagacccataagaat

SEQ ID NO: 5250 - DNA, 19 bp, Homo sapiens
aaacggagacccataagaa

SEQ ID NO: 5251 - DNA, 19 bp, Homo sapiens
taaacggagacccataaga

SEQ ID NO: 5252 - DNA, 19 bp, Homo sapiens
gtaaacggagacccataag

SEQ ID NO: 5253 - DNA, 19 bp, Homo sapiens
agtaaacggagacccataa

SEQ ID NO: 5254 - DNA, 19 bp, Homo sapiens
aagtaaacggagacccata

SEQ ID NO: 5255 - DNA, 19 bp, Homo sapiens
aaagtaaacggagacccat

SEQ ID NO: 5256 - DNA, 19 bp, Homo sapiens
gaaagtaaacggagaccca

SEQ ID NO: 5257 - DNA, 19 bp, Homo sapiens
agaaagtaaacggagaccc

SEQ ID NO: 5258 - DNA, 19 bp, Homo sapiens
cagaaagtaaacggagacc

SEQ ID NO: 5259 - DNA, 19 bp, Homo sapiens
acagaaagtaaacggagac

SEQ ID NO: 5260 - DNA, 19 bp, Homo sapiens
cacagaaagtaaacggaga

SEQ ID NO: 5261 - DNA, 19 bp, Homo sapiens
acacagaaagtaaacggag

SEQ ID NO: 5262 - DNA, 19 bp, Homo sapiens
aacacagaaagtaaacgga

SEQ ID NO: 5263 - DNA, 19 bp, Homo sapiens
caacacagaaagtaaacgg

SEQ ID NO: 5264 - DNA, 19 bp, Homo sapiens
acaacacagaaagtaaacg

SEQ ID NO: 5265 - DNA, 19 bp, Homo sapiens
aacaacacagaaagtaaac

SEQ ID NO: 5266 - DNA, 19 bp, Homo sapiens
caacaacacagaaagtaaa

SEQ ID NO: 5267 - DNA, 19 bp, Homo sapiens
tcaacaacacagaaagtaa

SEQ ID NO: 5268 - DNA, 19 bp, Homo sapiens
atcaacaacacagaaagta

SEQ ID NO: 5269 - DNA, 19 bp, Homo sapiens
catcaacaacacagaaagt

SEQ ID NO: 5270 - DNA, 19 bp, Homo sapiens
tcatcaacaacacagaaag

SEQ ID NO: 5271 - DNA, 19 bp, Homo sapiens
ctcatcaacaacacagaaa

SEQ ID NO: 5272 - DNA, 19 bp, Homo sapiens
gctcatcaacaacacagaa

SEQ ID NO: 5273 - DNA, 19 bp, Homo sapiens
ggctcatcaacaacacaga

SEQ ID NO: 5274 - DNA, 19 bp, Homo sapiens
tggctcatcaacaacacag

SEQ ID NO: 5275 - DNA, 19 bp, Homo sapiens
gtggctcatcaacaacaca

SEQ ID NO: 5276 - DNA, 19 bp, Homo sapiens
ggtggctcatcaacaacac

SEQ ID NO: 5277 - DNA, 19 bp, Homo sapiens
tggtggctcatcaacaaca

SEQ ID NO: 5278 - DNA, 19 bp, Homo sapiens
ctggtggctcatcaacaac

SEQ ID NO: 5279 - DNA, 19 bp, Homo sapiens
cctggtggctcatcaacaa

SEQ ID NO: 5280 - DNA, 19 bp, Homo sapiens
tcctggtggctcatcaaca

SEQ ID NO: 5281 - DNA, 19 bp, Homo sapiens
ttcctggtggctcatcaac

SEQ ID NO: 5282 - DNA, 19 bp, Homo sapiens
attcctggtggctcatcaa

SEQ ID NO: 5283 - DNA, 19 bp, Homo sapiens
tattcctggtggctcatca

SEQ ID NO: 5284 - DNA, 19 bp, Homo sapiens
ctattcctggtggctcatc

SEQ ID NO: 5285 - DNA, 19 bp, Homo sapiens
gctattcctggtggctcat

SEQ ID NO: 5286 - DNA, 19 bp, Homo sapiens
agctattcctggtggctca

SEQ ID NO: 5287 - DNA, 19 bp, Homo sapiens
cagctattcctggtggctc

SEQ ID NO: 5288 - DNA, 19 bp, Homo sapiens
tcagctattcctggtggct

SEQ ID NO: 5289 - DNA, 19 bp, Homo sapiens
gtcagctattcctggtggc

SEQ ID NO: 5290 - DNA, 19 bp, Homo sapiens
tgtcagctattcctggtgg

SEQ ID NO: 5291 - DNA, 19 bp, Homo sapiens
atgtcagctattcctggtg

SEQ ID NO: 5292 - DNA, 19 bp, Homo sapiens
catgtcagctattcctggt

SEQ ID NO: 5293 - DNA, 19 bp, Homo sapiens
acatgtcagctattcctgg

SEQ ID NO: 5294 - DNA, 19 bp, Homo sapiens
cacatgtcagctattcctg

SEQ ID NO: 5295 - DNA, 19 bp, Homo sapiens
ccacatgtcagctattcct

SEQ ID NO: 5296 - DNA, 19 bp, Homo sapiens
cccacatgtcagctattcc

SEQ ID NO: 5297 - DNA, 19 bp, Homo sapiens
tcccacatgtcagctattc

SEQ ID NO: 5298 - DNA, 19 bp, Homo sapiens
atcccacatgtcagctatt

SEQ ID NO: 5299 - DNA, 19 bp, Homo sapiens
catcccacatgtcagctat

SEQ ID NO: 5300 - DNA, 19 bp, Homo sapiens
acatcccacatgtcagcta

SEQ ID NO: 5301 - DNA, 19 bp, Homo sapiens
gacatcccacatgtcagct

SEQ ID NO: 5302 - DNA, 19 bp, Homo sapiens
tgacatcccacatgtcagc

SEQ ID NO: 5303 - DNA, 19 bp, Homo sapiens
ctgacatcccacatgtcag

SEQ ID NO: 5304 - DNA, 19 bp, Homo sapiens
tctgacatcccacatgtca

SEQ ID NO: 5305 - DNA, 19 bp, Homo sapiens
atctgacatcccacatgtc

SEQ ID NO: 5306 - DNA, 19 bp, Homo sapiens
gatctgacatcccacatgt

SEQ ID NO: 5307 - DNA, 19 bp, Homo sapiens
tgatctgacatcccacatg

SEQ ID NO: 5308 - DNA, 19 bp, Homo sapiens
ttgatctgacatcccacat

SEQ ID NO: 5309 - DNA, 19 bp, Homo sapiens
gttgatctgacatcccaca

SEQ ID NO: 5310 - DNA, 19 bp, Homo sapiens
tgttgatctgacatcccac

SEQ ID NO: 5311 - DNA, 19 bp, Homo sapiens
ttgttgatctgacatccca

SEQ ID NO: 5312 - DNA, 19 bp, Homo sapiens
tttgttgatctgacatccc

SEQ ID NO: 5313 - DNA, 19 bp, Homo sapiens
atttgttgatctgacatcc

SEQ ID NO: 5314 - DNA, 19 bp, Homo sapiens
catttgttgatctgacatc

SEQ ID NO: 5315 - DNA, 19 bp, Homo sapiens
gcatttgttgatctgacat

SEQ ID NO: 5316 - DNA, 19 bp, Homo sapiens
agcatttgttgatctgaca

SEQ ID NO: 5317 - DNA, 19 bp, Homo sapiens
tagcatttgttgatctgac

SEQ ID NO: 5318 - DNA, 19 bp, Homo sapiens
gtagcatttgttgatctga

SEQ ID NO: 5319 - DNA, 19 bp, Homo sapiens
ggtagcatttgttgatctg

SEQ ID NO: 5320 - DNA, 19 bp, Homo sapiens
aggtagcatttgttgatct

SEQ ID NO: 5321 - DNA, 19 bp, Homo sapiens
gaggtagcatttgttgatc

SEQ ID NO: 5322 - DNA, 19 bp, Homo sapiens
cgaggtagcatttgttgat

SEQ ID NO: 5323 - DNA, 19 bp, Homo sapiens
ccgaggtagcatttgttga

SEQ ID NO: 5324 - DNA, 19 bp, Homo sapiens
gccgaggtagcatttgttg

SEQ ID NO: 5325 - DNA, 19 bp, Homo sapiens
tgccgaggtagcatttgtt

SEQ ID NO: 5326 - DNA, 19 bp, Homo sapiens
ttgccgaggtagcatttgt

SEQ ID NO: 5327 - DNA, 19 bp, Homo sapiens
attgccgaggtagcatttg

SEQ ID NO: 5328 - DNA, 19 bp, Homo sapiens
gattgccgaggtagcattt

SEQ ID NO: 5329 - DNA, 19 bp, Homo sapiens
ggattgccgaggtagcatt

SEQ ID NO: 5330 - DNA, 19 bp, Homo sapiens
aggattgccgaggtagcat

SEQ ID NO: 5331 - DNA, 19 bp, Homo sapiens
aaggattgccgaggtagca

SEQ ID NO: 5332 - DNA, 19 bp, Homo sapiens
taaggattgccgaggtagc

SEQ ID NO: 5333 - DNA, 19 bp, Homo sapiens
gtaaggattgccgaggtag

SEQ ID NO: 5334 - DNA, 19 bp, Homo sapiens
cgtaaggattgccgaggta

SEQ ID NO: 5335 - DNA, 19 bp, Homo sapiens
ccgtaaggattgccgaggt

SEQ ID NO: 5336 - DNA, 19 bp, Homo sapiens
gccgtaaggattgccgagg

SEQ ID NO: 5337 - DNA, 19 bp, Homo sapiens
agccgtaaggattgccgag

SEQ ID NO: 5338 - DNA, 19 bp, Homo sapiens
tagccgtaaggattgccga

SEQ ID NO: 5339 - DNA, 19 bp, Homo sapiens
ttagccgtaaggattgccg

SEQ ID NO: 5340 - DNA, 19 bp, Homo sapiens
cttagccgtaaggattgcc

SEQ ID NO: 5341 - DNA, 19 bp, Homo sapiens
gcttagccgtaaggattgc

SEQ ID NO: 5342 - DNA, 19 bp, Homo sapiens
tgcttagccgtaaggattg

SEQ ID NO: 5343 - DNA, 19 bp, Homo sapiens
ctgcttagccgtaaggatt

SEQ ID NO: 5344 - DNA, 19 bp, Homo sapiens
cctgcttagccgtaaggat

SEQ ID NO: 5345 - DNA, 19 bp, Homo sapiens
acctgcttagccgtaagga

SEQ ID NO: 5346 - DNA, 19 bp, Homo sapiens
aacctgcttagccgtaagg

SEQ ID NO: 5347 - DNA, 19 bp, Homo sapiens
aaacctgcttagccgtaag

SEQ ID NO: 5348 - DNA, 19 bp, Homo sapiens
aaaacctgcttagccgtaa

SEQ ID NO: 5349 - DNA, 19 bp, Homo sapiens
taaaacctgcttagccgta

SEQ ID NO: 5350 - DNA, 19 bp, Homo sapiens
ataaaacctgcttagccgt

SEQ ID NO: 5351 - DNA, 19 bp, Homo sapiens
gataaaacctgcttagccg

SEQ ID NO: 5352 - DNA, 19 bp, Homo sapiens
agataaaacctgcttagcc

SEQ ID NO: 5353 - DNA, 19 bp, Homo sapiens
gagataaaacctgcttagc

SEQ ID NO: 5354 - DNA, 19 bp, Homo sapiens
ggagataaaacctgcttag

SEQ ID NO: 5355 - DNA, 19 bp, Homo sapiens
tggagataaaacctgctta

SEQ ID NO: 5356 - DNA, 19 bp, Homo sapiens
ctggagataaaacctgctt

SEQ ID NO: 5357 - DNA, 19 bp, Homo sapiens
cctggagataaaacctgct

SEQ ID NO: 5358 - DNA, 19 bp, Homo sapiens
tcctggagataaaacctgc

SEQ ID NO: 5359 - DNA, 19 bp, Homo sapiens
atcctggagataaaacctg

SEQ ID NO: 5360 - DNA, 19 bp, Homo sapiens
aatcctggagataaaacct

SEQ ID NO: 5361 - DNA, 19 bp, Homo sapiens
aaatcctggagataaaacc

SEQ ID NO: 5362 - DNA, 19 bp, Homo sapiens
aaaatcctggagataaaac

SEQ ID NO: 5363 - DNA, 19 bp, Homo sapiens
taaaatcctggagataaaa

SEQ ID NO: 5364 - DNA, 19 bp, Homo sapiens
ataaaatcctggagataaa

SEQ ID NO: 5365 - DNA, 19 bp, Homo sapiens
cataaaatcctggagataa

SEQ ID NO: 5366 - DNA, 19 bp, Homo sapiens
tcataaaatcctggagata

SEQ ID NO: 5367 - DNA, 19 bp, Homo sapiens
ttcataaaatcctggagat

SEQ ID NO: 5368 - DNA, 19 bp, Homo sapiens
tttcataaaatcctggaga

SEQ ID NO: 5369 - DNA, 19 bp, Homo sapiens
atttcataaaatcctggag

SEQ ID NO: 5370 - DNA, 19 bp, Homo sapiens
gatttcataaaatcctgga

SEQ ID NO: 5371 - DNA, 19 bp, Homo sapiens
ggatttcataaaatcctgg

SEQ ID NO: 5372 - DNA, 19 bp, Homo sapiens
gggatttcataaaatcctg

SEQ ID NO: 5373 - DNA, 19 bp, Homo sapiens
tgggatttcataaaatcct

SEQ ID NO: 5374 - DNA, 19 bp, Homo sapiens
ttgggatttcataaaatcc

SEQ ID NO: 5375 - DNA, 19 bp, Homo sapiens
attgggatttcataaaatc

SEQ ID NO: 5376 - DNA, 19 bp, Homo sapiens
gattgggatttcataaaat

SEQ ID NO: 5377 - DNA, 19 bp, Homo sapiens
ggattgggatttcataaaa

SEQ ID NO: 5378 - DNA, 19 bp, Homo sapiens
aggattgggatttcataaa

SEQ ID NO: 5379 - DNA, 19 bp, Homo sapiens
caggattgggatttcataa

SEQ ID NO: 5380 - DNA, 19 bp, Homo sapiens
ccaggattgggatttcata

SEQ ID NO: 5381 - DNA, 19 bp, Homo sapiens
accaggattgggatttcat

SEQ ID NO: 5382 - DNA, 19 bp, Homo sapiens
caccaggattgggatttca

SEQ ID NO: 5383 - DNA, 19 bp, Homo sapiens
tcaccaggattgggatttc

SEQ ID NO: 5384 - DNA, 19 bp, Homo sapiens
ttcaccaggattgggattt

SEQ ID NO: 5385 - DNA, 19 bp, Homo sapiens
cttcaccaggattgggatt

SEQ ID NO: 5386 - DNA, 19 bp, Homo sapiens
ccttcaccaggattgggat

SEQ ID NO: 5387 - DNA, 19 bp, Homo sapiens
tccttcaccaggattggga

SEQ ID NO: 5388 - DNA, 19 bp, Homo sapiens
gtccttcaccaggattggg

SEQ ID NO: 5389 - DNA, 19 bp, Homo sapiens
tgtccttcaccaggattgg

SEQ ID NO: 5390 - DNA, 19 bp, Homo sapiens
ctgtccttcaccaggattg

SEQ ID NO: 5391 - DNA, 19 bp, Homo sapiens
gctgtccttcaccaggatt

SEQ ID NO: 5392 - DNA, 19 bp, Homo sapiens
agctgtccttcaccaggat

SEQ ID NO: 5393 - DNA, 19 bp, Homo sapiens
tagctgtccttcaccagga

SEQ ID NO: 5394 - DNA, 19 bp, Homo sapiens
atagctgtccttcaccagg

SEQ ID NO: 5395 - DNA, 19 bp, Homo sapiens
tatagctgtccttcaccag

SEQ ID NO: 5396 - DNA, 19 bp, Homo sapiens
ttatagctgtccttcacca

SEQ ID NO: 5397 - DNA, 19 bp, Homo sapiens
gttatagctgtccttcacc

SEQ ID NO: 5398 - DNA, 19 bp, Homo sapiens
tgttatagctgtccttcac

SEQ ID NO: 5399 - DNA, 19 bp, Homo sapiens
ctgttatagctgtccttca

SEQ ID NO: 5400 - DNA, 19 bp, Homo sapiens
tctgttatagctgtccttc

SEQ ID NO: 5401 - DNA, 19 bp, Homo sapiens
ctctgttatagctgtcctt

SEQ ID NO: 5402 - DNA, 19 bp, Homo sapiens
gctctgttatagctgtcct

SEQ ID NO: 5403 - DNA, 19 bp, Homo sapiens
tgctctgttatagctgtcc

SEQ ID NO: 5404 - DNA, 19 bp, Homo sapiens
atgctctgttatagctgtc

SEQ ID NO: 5405 - DNA, 19 bp, Homo sapiens
catgctctgttatagctgt

SEQ ID NO: 5406 - DNA, 19 bp, Homo sapiens
acatgctctgttatagctg

SEQ ID NO: 5407 - DNA, 19 bp, Homo sapiens
cacatgctctgttatagct

SEQ ID NO: 5408 - DNA, 19 bp, Homo sapiens
tcacatgctctgttatagc

SEQ ID NO: 5409 - DNA, 19 bp, Homo sapiens
ttcacatgctctgttatag

SEQ ID NO: 5410 - DNA, 19 bp, Homo sapiens
attcacatgctctgttata

SEQ ID NO: 5411 - DNA, 19 bp, Homo sapiens
aattcacatgctctgttat

SEQ ID NO: 5412 - DNA, 19 bp, Homo sapiens
caattcacatgctctgtta

SEQ ID NO: 5413 - DNA, 19 bp, Homo sapiens
ccaattcacatgctctgtt

SEQ ID NO: 5414 - DNA, 19 bp, Homo sapiens
gccaattcacatgctctgt

SEQ ID NO: 5415 - DNA, 19 bp, Homo sapiens
tgccaattcacatgctctg

SEQ ID NO: 5416 - DNA, 19 bp, Homo sapiens
gtgccaattcacatgctct

SEQ ID NO: 5417 - DNA, 19 bp, Homo sapiens
tgtgccaattcacatgctc

SEQ ID NO: 5418 - DNA, 19 bp, Homo sapiens
ttgtgccaattcacatgct

SEQ ID NO: 5419 - DNA, 19 bp, Homo sapiens
tttgtgccaattcacatgc

SEQ ID NO: 5420 - DNA, 19 bp, Homo sapiens
atttgtgccaattcacatg

SEQ ID NO: 5421 - DNA, 19 bp, Homo sapiens
catttgtgccaattcacat

SEQ ID NO: 5422 - DNA, 19 bp, Homo sapiens
ccatttgtgccaattcaca

SEQ ID NO: 5423 - DNA, 19 bp, Homo sapiens
accatttgtgccaattcac

SEQ ID NO: 5424 - DNA, 19 bp, Homo sapiens
caccatttgtgccaattca

SEQ ID NO: 5425 - DNA, 19 bp, Homo sapiens
gcaccatttgtgccaattc

SEQ ID NO: 5426 - DNA, 19 bp, Homo sapiens
tgcaccatttgtgccaatt

SEQ ID NO: 5427 - DNA, 19 bp, Homo sapiens
ctgcaccatttgtgccaat

SEQ ID NO: 5428 - DNA, 19 bp, Homo sapiens
actgcaccatttgtgccaa

SEQ ID NO: 5429 - DNA, 19 bp, Homo sapiens
aactgcaccatttgtgcca

SEQ ID NO: 5430 - DNA, 19 bp, Homo sapiens
taactgcaccatttgtgcc

SEQ ID NO: 5431 - DNA, 19 bp, Homo sapiens
ataactgcaccatttgtgc

SEQ ID NO: 5432 - DNA, 19 bp, Homo sapiens
tataactgcaccatttgtg

SEQ ID NO: 5433 - DNA, 19 bp, Homo sapiens
atataactgcaccatttgt

SEQ ID NO: 5434 - DNA, 19 bp, Homo sapiens
catataactgcaccatttg

SEQ ID NO: 5435 - DNA, 19 bp, Homo sapiens
gcatataactgcaccattt

SEQ ID NO: 5436 - DNA, 19 bp, Homo sapiens
ggcatataactgcaccatt

SEQ ID NO: 5437 - DNA, 19 bp, Homo sapiens
aggcatataactgcaccat

SEQ ID NO: 5438 - DNA, 19 bp, Homo sapiens
caggcatataactgcacca

SEQ ID NO: 5439 - DNA, 19 bp, Homo sapiens
acaggcatataactgcacc

SEQ ID NO: 5440 - DNA, 19 bp, Homo sapiens
cacaggcatataactgcac

SEQ ID NO: 5441 - DNA, 19 bp, Homo sapiens
tcacaggcatataactgca

SEQ ID NO: 5442 - DNA, 19 bp, Homo sapiens
atcacaggcatataactgc

SEQ ID NO: 5443 - DNA, 19 bp, Homo sapiens
aatcacaggcatataactg

SEQ ID NO: 5444 - DNA, 19 bp, Homo sapiens
caatcacaggcatataact

SEQ ID NO: 5445 - DNA, 19 bp, Homo sapiens
gcaatcacaggcatataac

SEQ ID NO: 5446 - DNA, 19 bp, Homo sapiens
cgcaatcacaggcatataa

SEQ ID NO: 5447 - DNA, 19 bp, Homo sapiens
tcgcaatcacaggcatata

SEQ ID NO: 5448 - DNA, 19 bp, Homo sapiens
atcgcaatcacaggcatat

SEQ ID NO: 5449 - DNA, 19 bp, Homo sapiens
catcgcaatcacaggcata

SEQ ID NO: 5450 - DNA, 19 bp, Homo sapiens
tcatcgcaatcacaggcat

SEQ ID NO: 5451 - DNA, 19 bp, Homo sapiens
gtcatcgcaatcacaggca

SEQ ID NO: 5452 - DNA, 19 bp, Homo sapiens
tgtcatcgcaatcacaggc

SEQ ID NO: 5453 - DNA, 19 bp, Homo sapiens
ttgtcatcgcaatcacagg

SEQ ID NO: 5454 - DNA, 19 bp, Homo sapiens
gttgtcatcgcaatcacag

SEQ ID NO: 5455 - DNA, 19 bp, Homo sapiens
ggttgtcatcgcaatcaca

SEQ ID NO: 5456 - DNA, 19 bp, Homo sapiens
tggttgtcatcgcaatcac

SEQ ID NO: 5457 - DNA, 19 bp, Homo sapiens
gtggttgtcatcgcaatca

SEQ ID NO: 5458 - DNA, 19 bp, Homo sapiens
tgtggttgtcatcgcaatc

SEQ ID NO: 5459 - DNA, 19 bp, Homo sapiens
atgtggttgtcatcgcaat

SEQ ID NO: 5460 - DNA, 19 bp, Homo sapiens
catgtggttgtcatcgcaa

SEQ ID NO: 5461 - DNA, 19 bp, Homo sapiens
acatgtggttgtcatcgca

SEQ ID NO: 5462 - DNA, 19 bp, Homo sapiens
cacatgtggttgtcatcgc

SEQ ID NO: 5463 - DNA, 19 bp, Homo sapiens
gcacatgtggttgtcatcg

SEQ ID NO: 5464 - DNA, 19 bp, Homo sapiens
ggcacatgtggttgtcatc

SEQ ID NO: 5465 - DNA, 19 bp, Homo sapiens
aggcacatgtggttgtcat

SEQ ID NO: 5466 - DNA, 19 bp, Homo sapiens
caggcacatgtggttgtca

SEQ ID NO: 5467 - DNA, 19 bp, Homo sapiens
ccaggcacatgtggttgtc

SEQ ID NO: 5468 - DNA, 19 bp, Homo sapiens
tccaggcacatgtggttgt

SEQ ID NO: 5469 - DNA, 19 bp, Homo sapiens
gtccaggcacatgtggttg

SEQ ID NO: 5470 - DNA, 19 bp, Homo sapiens
agtccaggcacatgtggtt

SEQ ID NO: 5471 - DNA, 19 bp, Homo sapiens
gagtccaggcacatgtggt

SEQ ID NO: 5472 - DNA, 19 bp, Homo sapiens
agagtccaggcacatgtgg

SEQ ID NO: 5473 - DNA, 19 bp, Homo sapiens
cagagtccaggcacatgtg

SEQ ID NO: 5474 - DNA, 19 bp, Homo sapiens
ccagagtccaggcacatgt

SEQ ID NO: 5475 - DNA, 19 bp, Homo sapiens
accagagtccaggcacatg

SEQ ID NO: 5476 - DNA, 19 bp, Homo sapiens
caccagagtccaggcacat

SEQ ID NO: 5477 - DNA, 19 bp, Homo sapiens
gcaccagagtccaggcaca

SEQ ID NO: 5478 - DNA, 19 bp, Homo sapiens
ggcaccagagtccaggcac

SEQ ID NO: 5479 - DNA, 19 bp, Homo sapiens
cggcaccagagtccaggca

SEQ ID NO: 5480 - DNA, 19 bp, Homo sapiens
gcggcaccagagtccaggc

SEQ ID NO: 5481 - DNA, 19 bp, Homo sapiens
cgcggcaccagagtccagg

SEQ ID NO: 5482 - DNA, 19 bp, Homo sapiens
ccgcggcaccagagtccag

SEQ ID NO: 5483 - DNA, 19 bp, Homo sapiens
cccgcggcaccagagtcca

SEQ ID NO: 5484 - DNA, 19 bp, Homo sapiens
gcccgcggcaccagagtcc

SEQ ID NO: 5485 - DNA, 19 bp, Homo sapiens
tgcccgcggcaccagagtc

SEQ ID NO: 5486 - DNA, 19 bp, Homo sapiens
atgcccgcggcaccagagt

SEQ ID NO: 5487 - DNA, 19 bp, Homo sapiens
gatgcccgcggcaccagag

SEQ ID NO: 5488 - DNA, 19 bp, Homo sapiens
agatgcccgcggcaccaga

SEQ ID NO: 5489 - DNA, 19 bp, Homo sapiens
tagatgcccgcggcaccag

SEQ ID NO: 5490 - DNA, 19 bp, Homo sapiens
gtagatgcccgcggcacca

SEQ ID NO: 5491 - DNA, 19 bp, Homo sapiens
tgtagatgcccgcggcacc

SEQ ID NO: 5492 - DNA, 19 bp, Homo sapiens
gtgtagatgcccgcggcac

SEQ ID NO: 5493 - DNA, 19 bp, Homo sapiens
tgtgtagatgcccgcggca

SEQ ID NO: 5494 - DNA, 19 bp, Homo sapiens
ctgtgtagatgcccgcggc

SEQ ID NO: 5495 - DNA, 19 bp, Homo sapiens
tctgtgtagatgcccgcgg

SEQ ID NO: 5496 - DNA, 19 bp, Homo sapiens
ctctgtgtagatgcccgcg

SEQ ID NO: 5497 - DNA, 19 bp, Homo sapiens
cctctgtgtagatgcccgc

SEQ ID NO: 5498 - DNA, 19 bp, Homo sapiens
tcctctgtgtagatgcccg

SEQ ID NO: 5499 - DNA, 19 bp, Homo sapiens
gtcctctgtgtagatgccc

SEQ ID NO: 5500 - DNA, 19 bp, Homo sapiens
tgtcctctgtgtagatgcc

SEQ ID NO: 5501 - DNA, 19 bp, Homo sapiens
atgtcctctgtgtagatgc

SEQ ID NO: 5502 - DNA, 19 bp, Homo sapiens
tatgtcctctgtgtagatg

SEQ ID NO: 5503 - DNA, 19 bp, Homo sapiens
ttatgtcctctgtgtagat

SEQ ID NO: 5504 - DNA, 19 bp, Homo sapiens
gttatgtcctctgtgtaga

SEQ ID NO: 5505 - DNA, 19 bp, Homo sapiens
agttatgtcctctgtgtag

SEQ ID NO: 5506 - DNA, 19 bp, Homo sapiens
cagttatgtcctctgtgta

SEQ ID NO: 5507 - DNA, 19 bp, Homo sapiens
ccagttatgtcctctgtgt

SEQ ID NO: 5508 - DNA, 19 bp, Homo sapiens
accagttatgtcctctgtg

SEQ ID NO: 5509 - DNA, 19 bp, Homo sapiens
caccagttatgtcctctgt

SEQ ID NO: 5510 - DNA, 19 bp, Homo sapiens
tcaccagttatgtcctctg

SEQ ID NO: 5511 - DNA, 19 bp, Homo sapiens
gtcaccagttatgtcctct

SEQ ID NO: 5512 - DNA, 19 bp, Homo sapiens
tgtcaccagttatgtcctc

SEQ ID NO: 5513 - DNA, 19 bp, Homo sapiens
gtgtcaccagttatgtcct

SEQ ID NO: 5514 - DNA, 19 bp, Homo sapiens
cgtgtcaccagttatgtcc

SEQ ID NO: 5515 - DNA, 19 bp, Homo sapiens
acgtgtcaccagttatgtc

SEQ ID NO: 5516 - DNA, 19 bp, Homo sapiens
tacgtgtcaccagttatgt

SEQ ID NO: 5517 - DNA, 19 bp, Homo sapiens
atacgtgtcaccagttatg

SEQ ID NO: 5518 - DNA, 19 bp, Homo sapiens
catacgtgtcaccagttat

SEQ ID NO: 5519 - DNA, 19 bp, Homo sapiens
ccatacgtgtcaccagtta

SEQ ID NO: 5520 - DNA, 19 bp, Homo sapiens
cccatacgtgtcaccagtt

SEQ ID NO: 5521 - DNA, 19 bp, Homo sapiens
gcccatacgtgtcaccagt

SEQ ID NO: 5522 - DNA, 19 bp, Homo sapiens
ggcccatacgtgtcaccag

SEQ ID NO: 5523 - DNA, 19 bp, Homo sapiens
aggcccatacgtgtcacca

SEQ ID NO: 5524 - DNA, 19 bp, Homo sapiens
caggcccatacgtgtcacc

SEQ ID NO: 5525 - DNA, 19 bp, Homo sapiens
acaggcccatacgtgtcac

SEQ ID NO: 5526 - DNA, 19 bp, Homo sapiens
gacaggcccatacgtgtca

SEQ ID NO: 5527 - DNA, 19 bp, Homo sapiens
tgacaggcccatacgtgtc

SEQ ID NO: 5528 - DNA, 19 bp, Homo sapiens
gtgacaggcccatacgtgt

SEQ ID NO: 5529 - DNA, 19 bp, Homo sapiens
agtgacaggcccatacgtg

SEQ ID NO: 5530 - DNA, 19 bp, Homo sapiens
cagtgacaggcccatacgt

SEQ ID NO: 5531 - DNA, 19 bp, Homo sapiens
tcagtgacaggcccatacg

SEQ ID NO: 5532 - DNA, 19 bp, Homo sapiens
ttcagtgacaggcccatac

SEQ ID NO: 5533 - DNA, 19 bp, Homo sapiens
cttcagtgacaggcccata

SEQ ID NO: 5534 - DNA, 19 bp, Homo sapiens
tcttcagtgacaggcccat

SEQ ID NO: 5535 - DNA, 19 bp, Homo sapiens
gtcttcagtgacaggccca

SEQ ID NO: 5536 - DNA, 19 bp, Homo sapiens
ggtcttcagtgacaggccc

SEQ ID NO: 5537 - DNA, 19 bp, Homo sapiens
tggtcttcagtgacaggcc

SEQ ID NO: 5538 - DNA, 19 bp, Homo sapiens
ttggtcttcagtgacaggc

SEQ ID NO: 5539 - DNA, 19 bp, Homo sapiens
cttggtcttcagtgacagg

SEQ ID NO: 5540 - DNA, 19 bp, Homo sapiens
gcttggtcttcagtgacag

SEQ ID NO: 5541 - DNA, 19 bp, Homo sapiens
agcttggtcttcagtgaca

SEQ ID NO: 5542 - DNA, 19 bp, Homo sapiens
cagcttggtcttcagtgac

SEQ ID NO: 5543 - DNA, 19 bp, Homo sapiens
ccagcttggtcttcagtga

SEQ ID NO: 5544 - DNA, 19 bp, Homo sapiens
tccagcttggtcttcagtg

SEQ ID NO: 5545 - DNA, 19 bp, Homo sapiens
ctccagcttggtcttcagt

SEQ ID NO: 5546 - DNA, 19 bp, Homo sapiens
actccagcttggtcttcag

SEQ ID NO: 5547 - DNA, 19 bp, Homo sapiens
aactccagcttggtcttca

SEQ ID NO: 5548 - DNA, 19 bp, Homo sapiens
aaactccagcttggtcttc

SEQ ID NO: 5549 - DNA, 19 bp, Homo sapiens
gaaactccagcttggtctt

SEQ ID NO: 5550 - DNA, 19 bp, Homo sapiens
tgaaactccagcttggtct

SEQ ID NO: 5551 - DNA, 19 bp, Homo sapiens
ttgaaactccagcttggtc

SEQ ID NO: 5552 - DNA, 19 bp, Homo sapiens
tttgaaactccagcttggt

SEQ ID NO: 5553 - DNA, 19 bp, Homo sapiens
atttgaaactccagcttgg

SEQ ID NO: 5554 - DNA, 19 bp, Homo sapiens
catttgaaactccagcttg

SEQ ID NO: 5555 - DNA, 19 bp, Homo sapiens
acatttgaaactccagctt

SEQ ID NO: 5556 - DNA, 19 bp, Homo sapiens
aacatttgaaactccagct

SEQ ID NO: 5557 - DNA, 19 bp, Homo sapiens
caacatttgaaactccagc

SEQ ID NO: 5558 - DNA, 19 bp, Homo sapiens
ccaacatttgaaactccag

SEQ ID NO: 5559 - DNA, 19 bp, Homo sapiens
accaacatttgaaactcca

SEQ ID NO: 5560 - DNA, 19 bp, Homo sapiens
gaccaacatttgaaactcc

SEQ ID NO: 5561 - DNA, 19 bp, Homo sapiens
agaccaacatttgaaactc

SEQ ID NO: 5562 - DNA, 19 bp, Homo sapiens
aagaccaacatttgaaact

SEQ ID NO: 5563 - DNA, 19 bp, Homo sapiens
caagaccaacatttgaaac

SEQ ID NO: 5564 - DNA, 19 bp, Homo sapiens
ccaagaccaacatttgaaa

SEQ ID NO: 5565 - DNA, 19 bp, Homo sapiens
tccaagaccaacatttgaa

SEQ ID NO: 5566 - DNA, 19 bp, Homo sapiens
gtccaagaccaacatttga

SEQ ID NO: 5567 - DNA, 19 bp, Homo sapiens
ggtccaagaccaacatttg

SEQ ID NO: 5568 - DNA, 19 bp, Homo sapiens
tggtccaagaccaacattt

SEQ ID NO: 5569 - DNA, 19 bp, Homo sapiens
ctggtccaagaccaacatt

SEQ ID NO: 5570 - DNA, 19 bp, Homo sapiens
gctggtccaagaccaacat

SEQ ID NO: 5571 - DNA, 19 bp, Homo sapiens
tgctggtccaagaccaaca

SEQ ID NO: 5572 - DNA, 19 bp, Homo sapiens
ctgctggtccaagaccaac

SEQ ID NO: 5573 - DNA, 19 bp, Homo sapiens
cctgctggtccaagaccaa

SEQ ID NO: 5574 - DNA, 19 bp, Homo sapiens
ccctgctggtccaagacca

SEQ ID NO: 5575 - DNA, 19 bp, Homo sapiens
tccctgctggtccaagacc

SEQ ID NO: 5576 - DNA, 19 bp, Homo sapiens
atccctgctggtccaagac

SEQ ID NO: 5577 - DNA, 19 bp, Homo sapiens
aatccctgctggtccaaga

SEQ ID NO: 5578 - DNA, 19 bp, Homo sapiens
caatccctgctggtccaag

SEQ ID NO: 5579 - DNA, 19 bp, Homo sapiens
ccaatccctgctggtccaa

SEQ ID NO: 5580 - DNA, 19 bp, Homo sapiens
gccaatccctgctggtcca

SEQ ID NO: 5581 - DNA, 19 bp, Homo sapiens
tgccaatccctgctggtcc

SEQ ID NO: 5582 - DNA, 19 bp, Homo sapiens
atgccaatccctgctggtc

SEQ ID NO: 5583 - DNA, 19 bp, Homo sapiens
catgccaatccctgctggt

SEQ ID NO: 5584 - DNA, 19 bp, Homo sapiens
tcatgccaatccctgctgg

SEQ ID NO: 5585 - DNA, 19 bp, Homo sapiens
atcatgccaatccctgctg

SEQ ID NO: 5586 - DNA, 19 bp, Homo sapiens
catcatgccaatccctgct

SEQ ID NO: 5587 - DNA, 19 bp, Homo sapiens
ccatcatgccaatccctgc

SEQ ID NO: 5588 - DNA, 19 bp, Homo sapiens
accatcatgccaatccctg

SEQ ID NO: 5589 - DNA, 19 bp, Homo sapiens
aaccatcatgccaatccct

SEQ ID NO: 5590 - DNA, 19 bp, Homo sapiens
gaaccatcatgccaatccc

SEQ ID NO: 5591 - DNA, 19 bp, Homo sapiens
agaaccatcatgccaatcc

SEQ ID NO: 5592 - DNA, 19 bp, Homo sapiens
cagaaccatcatgccaatc

SEQ ID NO: 5593 - DNA, 19 bp, Homo sapiens
ccagaaccatcatgccaat

SEQ ID NO: 5594 - DNA, 19 bp, Homo sapiens
cccagaaccatcatgccaa

SEQ ID NO: 5595 - DNA, 19 bp, Homo sapiens
gcccagaaccatcatgcca

SEQ ID NO: 5596 - DNA, 19 bp, Homo sapiens
tgcccagaaccatcatgcc

SEQ ID NO: 5597 - DNA, 19 bp, Homo sapiens
atgcccagaaccatcatgc

SEQ ID NO: 5598 - DNA, 19 bp, Homo sapiens
gatgcccagaaccatcatg

SEQ ID NO: 5599 - DNA, 19 bp, Homo sapiens
ggatgcccagaaccatcat

SEQ ID NO: 5600 - DNA, 19 bp, Homo sapiens
aggatgcccagaaccatca

SEQ ID NO: 5601 - DNA, 19 bp, Homo sapiens
caggatgcccagaaccatc

SEQ ID NO: 5602 - DNA, 19 bp, Homo sapiens
gcaggatgcccagaaccat

SEQ ID NO: 5603 - DNA, 19 bp, Homo sapiens
agcaggatgcccagaacca

SEQ ID NO: 5604 - DNA, 19 bp, Homo sapiens
tagcaggatgcccagaacc

SEQ ID NO: 5605 - DNA, 19 bp, Homo sapiens
gtagcaggatgcccagaac

SEQ ID NO: 5606 - DNA, 19 bp, Homo sapiens
agtagcaggatgcccagaa

SEQ ID NO: 5607 - DNA, 19 bp, Homo sapiens
cagtagcaggatgcccaga

SEQ ID NO: 5608 - DNA, 19 bp, Homo sapiens
tcagtagcaggatgcccag

SEQ ID NO: 5609 - DNA, 19 bp, Homo sapiens
atcagtagcaggatgccca

SEQ ID NO: 5610 - DNA, 19 bp, Homo sapiens
aatcagtagcaggatgccc

SEQ ID NO: 5611 - DNA, 19 bp, Homo sapiens
aaatcagtagcaggatgcc

SEQ ID NO: 5612 - DNA, 19 bp, Homo sapiens
aaaatcagtagcaggatgc

SEQ ID NO: 5613 - DNA, 19 bp, Homo sapiens
caaaatcagtagcaggatg

SEQ ID NO: 5614 - DNA, 19 bp, Homo sapiens
ccaaaatcagtagcaggat

SEQ ID NO: 5615 - DNA, 19 bp, Homo sapiens
gccaaaatcagtagcagga

SEQ ID NO: 5616 - DNA, 19 bp, Homo sapiens
agccaaaatcagtagcagg

SEQ ID NO: 5617 - DNA, 19 bp, Homo sapiens
gagccaaaatcagtagcag

SEQ ID NO: 5618 - DNA, 19 bp, Homo sapiens
ggagccaaaatcagtagca

SEQ ID NO: 5619 - DNA, 19 bp, Homo sapiens
tggagccaaaatcagtagc

SEQ ID NO: 5620 - DNA, 19 bp, Homo sapiens
gtggagccaaaatcagtag

SEQ ID NO: 5621 - DNA, 19 bp, Homo sapiens
agtggagccaaaatcagta

SEQ ID NO: 5622 - DNA, 19 bp, Homo sapiens
gagtggagccaaaatcagt

SEQ ID NO: 5623 - DNA, 19 bp, Homo sapiens
agagtggagccaaaatcag

SEQ ID NO: 5624 - DNA, 19 bp, Homo sapiens
aagagtggagccaaaatca

SEQ ID NO: 5625 - DNA, 19 bp, Homo sapiens
caagagtggagccaaaatc

SEQ ID NO: 5626 - DNA, 19 bp, Homo sapiens
gcaagagtggagccaaaat

SEQ ID NO: 5627 - DNA, 19 bp, Homo sapiens
agcaagagtggagccaaaa

SEQ ID NO: 5628 - DNA, 19 bp, Homo sapiens
cagcaagagtggagccaaa

SEQ ID NO: 5629 - DNA, 19 bp, Homo sapiens
gcagcaagagtggagccaa

SEQ ID NO: 5630 - DNA, 19 bp, Homo sapiens
agcagcaagagtggagcca

SEQ ID NO: 5631 - DNA, 19 bp, Homo sapiens
gagcagcaagagtggagcc

SEQ ID NO: 5632 - DNA, 19 bp, Homo sapiens
ggagcagcaagagtggagc

SEQ ID NO: 5633 - DNA, 19 bp, Homo sapiens
aggagcagcaagagtggag

SEQ ID NO: 5634 - DNA, 19 bp, Homo sapiens
caggagcagcaagagtgga

SEQ ID NO: 5635 - DNA, 19 bp, Homo sapiens
acaggagcagcaagagtgg

SEQ ID NO: 5636 - DNA, 19 bp, Homo sapiens
cacaggagcagcaagagtg

SEQ ID NO: 5637 - DNA, 19 bp, Homo sapiens
acacaggagcagcaagagt

SEQ ID NO: 5638 - DNA, 19 bp, Homo sapiens
aacacaggagcagcaagag

SEQ ID NO: 5639 - DNA, 19 bp, Homo sapiens
caacacaggagcagcaaga

SEQ ID NO: 5640 - DNA, 19 bp, Homo sapiens
gcaacacaggagcagcaag

SEQ ID NO: 5641 - DNA, 19 bp, Homo sapiens
agcaacacaggagcagcaa

SEQ ID NO: 5642 - DNA, 19 bp, Homo sapiens
cagcaacacaggagcagca

SEQ ID NO: 5643 - DNA, 19 bp, Homo sapiens
gcagcaacacaggagcagc

SEQ ID NO: 5644 - DNA, 19 bp, Homo sapiens
tgcagcaacacaggagcag

SEQ ID NO: 5645 - DNA, 19 bp, Homo sapiens
ttgcagcaacacaggagca

SEQ ID NO: 5646 - DNA, 19 bp, Homo sapiens
tttgcagcaacacaggagc

SEQ ID NO: 5647 - DNA, 19 bp, Homo sapiens
gtttgcagcaacacaggag

SEQ ID NO: 5648 - DNA, 19 bp, Homo sapiens
tgtttgcagcaacacagga

SEQ ID NO: 5649 - DNA, 19 bp, Homo sapiens
ctgtttgcagcaacacagg

SEQ ID NO: 5650 - DNA, 19 bp, Homo sapiens
tctgtttgcagcaacacag

SEQ ID NO: 5651 - DNA, 19 bp, Homo sapiens
ctctgtttgcagcaacaca

SEQ ID NO: 5652 - DNA, 19 bp, Homo sapiens
tctctgtttgcagcaacac

SEQ ID NO: 5653 - DNA, 19 bp, Homo sapiens
gtctctgtttgcagcaaca

SEQ ID NO: 5654 - DNA, 19 bp, Homo sapiens
tgtctctgtttgcagcaac

SEQ ID NO: 5655 - DNA, 19 bp, Homo sapiens
ctgtctctgtttgcagcaa

SEQ ID NO: 5656 - DNA, 19 bp, Homo sapiens
gctgtctctgtttgcagca

SEQ ID NO: 5657 - DNA, 19 bp, Homo sapiens
ggctgtctctgtttgcagc

SEQ ID NO: 5658 - DNA, 19 bp, Homo sapiens
tggctgtctctgtttgcag

SEQ ID NO: 5659 - DNA, 19 bp, Homo sapiens
ctggctgtctctgtttgca

SEQ ID NO: 5660 - DNA, 19 bp, Homo sapiens
tctggctgtctctgtttgc

SEQ ID NO: 5661 - DNA, 19 bp, Homo sapiens
ttctggctgtctctgtttg

SEQ ID NO: 5662 - DNA, 19 bp, Homo sapiens
cttctggctgtctctgttt

SEQ ID NO: 5663 - DNA, 19 bp, Homo sapiens
ccttctggctgtctctgtt

SEQ ID NO: 5664 - DNA, 19 bp, Homo sapiens
gccttctggctgtctctgt

SEQ ID NO: 5665 - DNA, 19 bp, Homo sapiens
ggccttctggctgtctctg

SEQ ID NO: 5666 - DNA, 19 bp, Homo sapiens
aggccttctggctgtctct

SEQ ID NO: 5667 - DNA, 19 bp, Homo sapiens
caggccttctggctgtctc

SEQ ID NO: 5668 - DNA, 19 bp, Homo sapiens
ccaggccttctggctgtct

SEQ ID NO: 5669 - DNA, 19 bp, Homo sapiens
cccaggccttctggctgtc

SEQ ID NO: 5670 - DNA, 19 bp, Homo sapiens
tcccaggccttctggctgt

SEQ ID NO: 5671 - DNA, 19 bp, Homo sapiens
ttcccaggccttctggctg

SEQ ID NO: 5672 - DNA, 19 bp, Homo sapiens
gttcccaggccttctggct

SEQ ID NO: 5673 - DNA, 19 bp, Homo sapiens
tgttcccaggccttctggc

SEQ ID NO: 5674 - DNA, 19 bp, Homo sapiens
ttgttcccaggccttctgg

SEQ ID NO: 5675 - DNA, 19 bp, Homo sapiens
cttgttcccaggccttctg

SEQ ID NO: 5676 - DNA, 19 bp, Homo sapiens
tcttgttcccaggccttct

SEQ ID NO: 5677 - DNA, 19 bp, Homo sapiens
atcttgttcccaggccttc

SEQ ID NO: 5678 - DNA, 19 bp, Homo sapiens
aatcttgttcccaggcctt

SEQ ID NO: 5679 - DNA, 19 bp, Homo sapiens
aaatcttgttcccaggcct

SEQ ID NO: 5680 - DNA, 19 bp, Homo sapiens
caaatcttgttcccaggcc

SEQ ID NO: 5681 - DNA, 19 bp, Homo sapiens
gcaaatcttgttcccaggc

SEQ ID NO: 5682 - DNA, 19 bp, Homo sapiens
agcaaatcttgttcccagg

SEQ ID NO: 5683 - DNA, 19 bp, Homo sapiens
gagcaaatcttgttcccag

SEQ ID NO: 5684 - DNA, 19 bp, Homo sapiens
ggagcaaatcttgttccca

SEQ ID NO: 5685 - DNA, 19 bp, Homo sapiens
aggagcaaatcttgttccc

SEQ ID NO: 5686 - DNA, 19 bp, Homo sapiens
caggagcaaatcttgttcc

SEQ ID NO: 5687 - DNA, 19 bp, Homo sapiens
acaggagcaaatcttgttc

SEQ ID NO: 5688 - DNA, 19 bp, Homo sapiens
cacaggagcaaatcttgtt

SEQ ID NO: 5689 - DNA, 19 bp, Homo sapiens
gcacaggagcaaatcttgt

SEQ ID NO: 5690 - DNA, 19 bp, Homo sapiens
ggcacaggagcaaatcttg

SEQ ID NO: 5691 - DNA, 19 bp, Homo sapiens
aggcacaggagcaaatctt

SEQ ID NO: 5692 - DNA, 19 bp, Homo sapiens
caggcacaggagcaaatct

SEQ ID NO: 5693 - DNA, 19 bp, Homo sapiens
tcaggcacaggagcaaatc

SEQ ID NO: 5694 - DNA, 19 bp, Homo sapiens
ctcaggcacaggagcaaat

SEQ ID NO: 5695 - DNA, 19 bp, Homo sapiens
cctcaggcacaggagcaaa

SEQ ID NO: 5696 - DNA, 19 bp, Homo sapiens
ccctcaggcacaggagcaa

SEQ ID NO: 5697 - DNA, 19 bp, Homo sapiens
gccctcaggcacaggagca

SEQ ID NO: 5698 - DNA, 19 bp, Homo sapiens
cgccctcaggcacaggagc

SEQ ID NO: 5699 - DNA, 19 bp, Homo sapiens
ccgccctcaggcacaggag

SEQ ID NO: 5700 - DNA, 19 bp, Homo sapiens
tccgccctcaggcacagga

SEQ ID NO: 5701 - DNA, 19 bp, Homo sapiens
ctccgccctcaggcacagg

SEQ ID NO: 5702 - DNA, 19 bp, Homo sapiens
tctccgccctcaggcacag

SEQ ID NO: 5703 - DNA, 19 bp, Homo sapiens
ttctccgccctcaggcaca

SEQ ID NO: 5704 - DNA, 19 bp, Homo sapiens
cttctccgccctcaggcac

SEQ ID NO: 5705 - DNA, 19 bp, Homo sapiens
ccttctccgccctcaggca

SEQ ID NO: 5706 - DNA, 19 bp, Homo sapiens
tccttctccgccctcaggc

SEQ ID NO: 5707 - DNA, 19 bp, Homo sapiens
ctccttctccgccctcagg

SEQ ID NO: 5708 - DNA, 19 bp, Homo sapiens
actccttctccgccctcag

SEQ ID NO: 5709 - DNA, 19 bp, Homo sapiens
cactccttctccgccctca

SEQ ID NO: 5710 - DNA, 19 bp, Homo sapiens
tcactccttctccgccctc

SEQ ID NO: 5711 - DNA, 19 bp, Homo sapiens
atcactccttctccgccct

SEQ ID NO: 5712 - DNA, 19 bp, Homo sapiens
catcactccttctccgccc

SEQ ID NO: 5713 - DNA, 19 bp, Homo sapiens
gcatcactccttctccgcc

SEQ ID NO: 5714 - DNA, 19 bp, Homo sapiens
tgcatcactccttctccgc

SEQ ID NO: 5715 - DNA, 19 bp, Homo sapiens
ctgcatcactccttctccg

SEQ ID NO: 5716 - DNA, 19 bp, Homo sapiens
actgcatcactccttctcc

SEQ ID NO: 5717 - DNA, 19 bp, Homo sapiens
gactgcatcactccttctc

SEQ ID NO: 5718 - DNA, 19 bp, Homo sapiens
agactgcatcactccttct

SEQ ID NO: 5719 - DNA, 19 bp, Homo sapiens
aagactgcatcactccttc

SEQ ID NO: 5720 - DNA, 19 bp, Homo sapiens
caagactgcatcactcctt

SEQ ID NO: 5721 - DNA, 19 bp, Homo sapiens
ccaagactgcatcactcct

SEQ ID NO: 5722 - DNA, 19 bp, Homo sapiens
tccaagactgcatcactcc

SEQ ID NO: 5723 - DNA, 19 bp, Homo sapiens
ctccaagactgcatcactc

SEQ ID NO: 5724 - DNA, 19 bp, Homo sapiens
tctccaagactgcatcact

SEQ ID NO: 5725 - DNA, 19 bp, Homo sapiens
ttctccaagactgcatcac

SEQ ID NO: 5726 - DNA, 19 bp, Homo sapiens
attctccaagactgcatca

SEQ ID NO: 5727 - DNA, 19 bp, Homo sapiens
aattctccaagactgcatc

SEQ ID NO: 5728 - DNA, 19 bp, Homo sapiens
caattctccaagactgcat

SEQ ID NO: 5729 - DNA, 19 bp, Homo sapiens
tcaattctccaagactgca

SEQ ID NO: 5730 - DNA, 19 bp, Homo sapiens
ttcaattctccaagactgc

SEQ ID NO: 5731 - DNA, 19 bp, Homo sapiens
cttcaattctccaagactg

SEQ ID NO: 5732 - DNA, 19 bp, Homo sapiens
ccttcaattctccaagact

SEQ ID NO: 5733 - DNA, 19 bp, Homo sapiens
cccttcaattctccaagac

SEQ ID NO: 5734 - DNA, 19 bp, Homo sapiens
ccccttcaattctccaaga

SEQ ID NO: 5735 - DNA, 19 bp, Homo sapiens
gccccttcaattctccaag

SEQ ID NO: 5736 - DNA, 19 bp, Homo sapiens
ggccccttcaattctccaa

SEQ ID NO: 5737 - DNA, 19 bp, Homo sapiens
gggccccttcaattctcca

SEQ ID NO: 5738 - DNA, 19 bp, Homo sapiens
tgggccccttcaattctcc

SEQ ID NO: 5739 - DNA, 19 bp, Homo sapiens
atgggccccttcaattctc

SEQ ID NO: 5740 - DNA, 19 bp, Homo sapiens
gatgggccccttcaattct

SEQ ID NO: 5741 - DNA, 19 bp, Homo sapiens
ggatgggccccttcaattc

SEQ ID NO: 5742 - DNA, 19 bp, Homo sapiens
gggatgggccccttcaatt

SEQ ID NO: 5743 - DNA, 19 bp, Homo sapiens
cgggatgggccccttcaat

SEQ ID NO: 5744 - DNA, 19 bp, Homo sapiens
tcgggatgggccccttcaa

SEQ ID NO: 5745 - DNA, 19 bp, Homo sapiens
ctcgggatgggccccttca

SEQ ID NO: 5746 - DNA, 19 bp, Homo sapiens
cctcgggatgggccccttc

SEQ ID NO: 5747 - DNA, 19 bp, Homo sapiens
tcctcgggatgggcccctt

SEQ ID NO: 5748 - DNA, 19 bp, Homo sapiens
gtcctcgggatgggcccct

SEQ ID NO: 5749 - DNA, 19 bp, Homo sapiens
tgtcctcgggatgggcccc

SEQ ID NO: 5750 - DNA, 19 bp, Homo sapiens
ctgtcctcgggatgggccc

SEQ ID NO: 5751 - DNA, 19 bp, Homo sapiens
cctgtcctcgggatgggcc

SEQ ID NO: 5752 - DNA, 19 bp, Homo sapiens
ccctgtcctcgggatgggc

SEQ ID NO: 5753 - DNA, 19 bp, Homo sapiens
tccctgtcctcgggatggg

SEQ ID NO: 5754 - DNA, 19 bp, Homo sapiens
atccctgtcctcgggatgg

SEQ ID NO: 5755 - DNA, 19 bp, Homo sapiens
catccctgtcctcgggatg

SEQ ID NO: 5756 - DNA, 19 bp, Homo sapiens
acatccctgtcctcgggat

SEQ ID NO: 5757 - DNA, 19 bp, Homo sapiens
cacatccctgtcctcggga

SEQ ID NO: 5758 - DNA, 19 bp, Homo sapiens
acacatccctgtcctcggg

SEQ ID NO: 5759 - DNA, 19 bp, Homo sapiens
gacacatccctgtcctcgg

SEQ ID NO: 5760 - DNA, 19 bp, Homo sapiens
tgacacatccctgtcctcg

SEQ ID NO: 5761 - DNA, 19 bp, Homo sapiens
ttgacacatccctgtcctc

SEQ ID NO: 5762 - DNA, 19 bp, Homo sapiens
tttgacacatccctgtcct

SEQ ID NO: 5763 - DNA, 19 bp, Homo sapiens
atttgacacatccctgtcc

SEQ ID NO: 5764 - DNA, 19 bp, Homo sapiens
tatttgacacatccctgtc

SEQ ID NO: 5765 - DNA, 19 bp, Homo sapiens
atatttgacacatccctgt

SEQ ID NO: 5766 - DNA, 19 bp, Homo sapiens
tatatttgacacatccctg

SEQ ID NO: 5767 - DNA, 19 bp, Homo sapiens
atatatttgacacatccct

SEQ ID NO: 5768 - DNA, 19 bp, Homo sapiens
catatatttgacacatccc

SEQ ID NO: 5769 - DNA, 19 bp, Homo sapiens
acatatatttgacacatcc

SEQ ID NO: 5770 - DNA, 19 bp, Homo sapiens
cacatatatttgacacatc

SEQ ID NO: 5771 - DNA, 19 bp, Homo sapiens
gcacatatatttgacacat

SEQ ID NO: 5772 - DNA, 19 bp, Homo sapiens
tgcacatatatttgacaca

SEQ ID NO: 5773 - DNA, 19 bp, Homo sapiens
gtgcacatatatttgacac

SEQ ID NO: 5774 - DNA, 19 bp, Homo sapiens
ggtgcacatatatttgaca

SEQ ID NO: 5775 - DNA, 19 bp, Homo sapiens
gggtgcacatatatttgac

SEQ ID NO: 5776 - DNA, 19 bp, Homo sapiens
tgggtgcacatatatttga

SEQ ID NO: 5777 - DNA, 19 bp, Homo sapiens
atgggtgcacatatatttg

SEQ ID NO: 5778 - DNA, 19 bp, Homo sapiens
catgggtgcacatatattt

SEQ ID NO: 5779 - DNA, 19 bp, Homo sapiens
tcatgggtgcacatatatt

SEQ ID NO: 5780 - DNA, 19 bp, Homo sapiens
gtcatgggtgcacatatat

SEQ ID NO: 5781 - DNA, 19 bp, Homo sapiens
tgtcatgggtgcacatata

SEQ ID NO: 5782 - DNA, 19 bp, Homo sapiens
ctgtcatgggtgcacatat

SEQ ID NO: 5783 - DNA, 19 bp, Homo sapiens
gctgtcatgggtgcacata

SEQ ID NO: 5784 - DNA, 19 bp, Homo sapiens
ggctgtcatgggtgcacat

SEQ ID NO: 5785 - DNA, 19 bp, Homo sapiens
aggctgtcatgggtgcaca

SEQ ID NO: 5786 - DNA, 19 bp, Homo sapiens
gaggctgtcatgggtgcac

SEQ ID NO: 5787 - DNA, 19 bp, Homo sapiens
tgaggctgtcatgggtgca

SEQ ID NO: 5788 - DNA, 19 bp, Homo sapiens
ttgaggctgtcatgggtgc

SEQ ID NO: 5789 - DNA, 19 bp, Homo sapiens
tttgaggctgtcatgggtg

SEQ ID NO: 5790 - DNA, 19 bp, Homo sapiens
atttgaggctgtcatgggt

SEQ ID NO: 5791 - DNA, 19 bp, Homo sapiens
tatttgaggctgtcatggg

SEQ ID NO: 5792 - DNA, 19 bp, Homo sapiens
gtatttgaggctgtcatgg

SEQ ID NO: 5793 - DNA, 19 bp, Homo sapiens
ggtatttgaggctgtcatg

SEQ ID NO: 5794 - DNA, 19 bp, Homo sapiens
gggtatttgaggctgtcat

SEQ ID NO: 5795 - DNA, 19 bp, Homo sapiens
tgggtatttgaggctgtca

SEQ ID NO: 5796 - DNA, 19 bp, Homo sapiens
ctgggtatttgaggctgtc

SEQ ID NO: 5797 - DNA, 19 bp, Homo sapiens
cctgggtatttgaggctgt

SEQ ID NO: 5798 - DNA, 19 bp, Homo sapiens
tcctgggtatttgaggctg

SEQ ID NO: 5799 - DNA, 19 bp, Homo sapiens
atcctgggtatttgaggct

SEQ ID NO: 5800 - DNA, 19 bp, Homo sapiens
gatcctgggtatttgaggc

SEQ ID NO: 5801 - DNA, 19 bp, Homo sapiens
cgatcctgggtatttgagg

SEQ ID NO: 5802 - DNA, 19 bp, Homo sapiens
ccgatcctgggtatttgag

SEQ ID NO: 5803 - DNA, 19 bp, Homo sapiens
tccgatcctgggtatttga

SEQ ID NO: 5804 - DNA, 19 bp, Homo sapiens
atccgatcctgggtatttg

SEQ ID NO: 5805 - DNA, 19 bp, Homo sapiens
catccgatcctgggtattt

SEQ ID NO: 5806 - DNA, 19 bp, Homo sapiens
ccatccgatcctgggtatt

SEQ ID NO: 5807 - DNA, 19 bp, Homo sapiens
tccatccgatcctgggtat

SEQ ID NO: 5808 - DNA, 19 bp, Homo sapiens
atccatccgatcctgggta

SEQ ID NO: 5809 - DNA, 19 bp, Homo sapiens
aatccatccgatcctgggt

SEQ ID NO: 5810 - DNA, 19 bp, Homo sapiens
gaatccatccgatcctggg

SEQ ID NO: 5811 - DNA, 19 bp, Homo sapiens
ggaatccatccgatcctgg

SEQ ID NO: 5812 - DNA, 19 bp, Homo sapiens
aggaatccatccgatcctg

SEQ ID NO: 5813 - DNA, 19 bp, Homo sapiens
gaggaatccatccgatcct

SEQ ID NO: 5814 - DNA, 19 bp, Homo sapiens
agaggaatccatccgatcc

SEQ ID NO: 5815 - DNA, 19 bp, Homo sapiens
cagaggaatccatccgatc

SEQ ID NO: 5816 - DNA, 19 bp, Homo sapiens
tcagaggaatccatccgat

SEQ ID NO: 5817 - DNA, 19 bp, Homo sapiens
ttcagaggaatccatccga

SEQ ID NO: 5818 - DNA, 19 bp, Homo sapiens
tttcagaggaatccatccg

SEQ ID NO: 5819 - DNA, 19 bp, Homo sapiens
atttcagaggaatccatcc

SEQ ID NO: 5820 - DNA, 19 bp, Homo sapiens
gatttcagaggaatccatc

SEQ ID NO: 5821 - DNA, 19 bp, Homo sapiens
agatttcagaggaatccat

SEQ ID NO: 5822 - DNA, 19 bp, Homo sapiens
tagatttcagaggaatcca

SEQ ID NO: 5823 - DNA, 19 bp, Homo sapiens
gtagatttcagaggaatcc

SEQ ID NO: 5824 - DNA, 19 bp, Homo sapiens
tgtagatttcagaggaatc

SEQ ID NO: 5825 - DNA, 19 bp, Homo sapiens
gtgtagatttcagaggaat

SEQ ID NO: 5826 - DNA, 19 bp, Homo sapiens
ggtgtagatttcagaggaa

SEQ ID NO: 5827 - DNA, 19 bp, Homo sapiens
tggtgtagatttcagagga

SEQ ID NO: 5828 - DNA, 19 bp, Homo sapiens
ttggtgtagatttcagagg

SEQ ID NO: 5829 - DNA, 19 bp, Homo sapiens
gttggtgtagatttcagag

SEQ ID NO: 5830 - DNA, 19 bp, Homo sapiens
tgttggtgtagatttcaga

SEQ ID NO: 5831 - DNA, 19 bp, Homo sapiens
gtgttggtgtagatttcag

SEQ ID NO: 5832 - DNA, 19 bp, Homo sapiens
ggtgttggtgtagatttca

SEQ ID NO: 5833 - DNA, 19 bp, Homo sapiens
aggtgttggtgtagatttc

SEQ ID NO: 5834 - DNA, 19 bp, Homo sapiens
taggtgttggtgtagattt

SEQ ID NO: 5835 - DNA, 19 bp, Homo sapiens
ataggtgttggtgtagatt

SEQ ID NO: 5836 - DNA, 19 bp, Homo sapiens
cataggtgttggtgtagat

SEQ ID NO: 5837 - DNA, 19 bp, Homo sapiens
gcataggtgttggtgtaga

SEQ ID NO: 5838 - DNA, 19 bp, Homo sapiens
tgcataggtgttggtgtag

SEQ ID NO: 5839 - DNA, 19 bp, Homo sapiens
ctgcataggtgttggtgta

SEQ ID NO: 5840 - DNA, 19 bp, Homo sapiens
gctgcataggtgttggtgt

SEQ ID NO: 5841 - DNA, 19 bp, Homo sapiens
ggctgcataggtgttggtg

SEQ ID NO: 5842 - DNA, 19 bp, Homo sapiens
cggctgcataggtgttggt

SEQ ID NO: 5843 - DNA, 19 bp, Homo sapiens
ccggctgcataggtgttgg

SEQ ID NO: 5844 - DNA, 19 bp, Homo sapiens
cccggctgcataggtgttg

SEQ ID NO: 5845 - DNA, 19 bp, Homo sapiens
ccccggctgcataggtgtt

SEQ ID NO: 5846 - DNA, 19 bp, Homo sapiens
cccccggctgcataggtgt

SEQ ID NO: 5847 - DNA, 19 bp, Homo sapiens
gcccccggctgcataggtg

SEQ ID NO: 5848 - DNA, 19 bp, Homo sapiens
tgcccccggctgcataggt

SEQ ID NO: 5849 - DNA, 19 bp, Homo sapiens
gtgcccccggctgcatagg

SEQ ID NO: 5850 - DNA, 19 bp, Homo sapiens
cgtgcccccggctgcatag

SEQ ID NO: 5851 - DNA, 19 bp, Homo sapiens
ccgtgcccccggctgcata

SEQ ID NO: 5852 - DNA, 19 bp, Homo sapiens
accgtgcccccggctgcat

SEQ ID NO: 5853 - DNA, 19 bp, Homo sapiens
caccgtgcccccggctgca

SEQ ID NO: 5854 - DNA, 19 bp, Homo sapiens
ccaccgtgcccccggctgc

SEQ ID NO: 5855 - DNA, 19 bp, Homo sapiens
tccaccgtgcccccggctg

SEQ ID NO: 5856 - DNA, 19 bp, Homo sapiens
ttccaccgtgcccccggct

SEQ ID NO: 5857 - DNA, 19 bp, Homo sapiens
cttccaccgtgcccccggc

SEQ ID NO: 5858 - DNA, 19 bp, Homo sapiens
ccttccaccgtgcccccgg

SEQ ID NO: 5859 - DNA, 19 bp, Homo sapiens
tccttccaccgtgcccccg

SEQ ID NO: 5860 - DNA, 19 bp, Homo sapiens
ctccttccaccgtgccccc

SEQ ID NO: 5861 - DNA, 19 bp, Homo sapiens
cctccttccaccgtgcccc

SEQ ID NO: 5862 - DNA, 19 bp, Homo sapiens
acctccttccaccgtgccc

SEQ ID NO: 5863 - DNA, 19 bp, Homo sapiens
cacctccttccaccgtgcc

SEQ ID NO: 5864 - DNA, 19 bp, Homo sapiens
acacctccttccaccgtgc

SEQ ID NO: 5865 - DNA, 19 bp, Homo sapiens
tacacctccttccaccgtg

SEQ ID NO: 5866 - DNA, 19 bp, Homo sapiens
atacacctccttccaccgt

SEQ ID NO: 5867 - DNA, 19 bp, Homo sapiens
gatacacctccttccaccg

SEQ ID NO: 5868 - DNA, 19 bp, Homo sapiens
cgatacacctccttccacc

SEQ ID NO: 5869 - DNA, 19 bp, Homo sapiens
ccgatacacctccttccac

SEQ ID NO: 5870 - DNA, 19 bp, Homo sapiens
cccgatacacctccttcca

SEQ ID NO: 5871 - DNA, 19 bp, Homo sapiens
tcccgatacacctccttcc

SEQ ID NO: 5872 - DNA, 19 bp, Homo sapiens
ctcccgatacacctccttc

SEQ ID NO: 5873 - DNA, 19 bp, Homo sapiens
actcccgatacacctcctt

SEQ ID NO: 5874 - DNA, 19 bp, Homo sapiens
cactcccgatacacctcct

SEQ ID NO: 5875 - DNA, 19 bp, Homo sapiens
ccactcccgatacacctcc

SEQ ID NO: 5876 - DNA, 19 bp, Homo sapiens
tccactcccgatacacctc

SEQ ID NO: 5877 - DNA, 19 bp, Homo sapiens
ctccactcccgatacacct

SEQ ID NO: 5878 - DNA, 19 bp, Homo sapiens
gctccactcccgatacacc

SEQ ID NO: 5879 - DNA, 19 bp, Homo sapiens
agctccactcccgatacac

SEQ ID NO: 5880 - DNA, 19 bp, Homo sapiens
gagctccactcccgataca

SEQ ID NO: 5881 - DNA, 19 bp, Homo sapiens
tgagctccactcccgatac

SEQ ID NO: 5882 - DNA, 19 bp, Homo sapiens
ttgagctccactcccgata

SEQ ID NO: 5883 - DNA, 19 bp, Homo sapiens
gttgagctccactcccgat

SEQ ID NO: 5884 - DNA, 19 bp, Homo sapiens
tgttgagctccactcccga

SEQ ID NO: 5885 - DNA, 19 bp, Homo sapiens
gtgttgagctccactcccg

SEQ ID NO: 5886 - DNA, 19 bp, Homo sapiens
tgtgttgagctccactccc

SEQ ID NO: 5887 - DNA, 19 bp, Homo sapiens
ctgtgttgagctccactcc

SEQ ID NO: 5888 - DNA, 19 bp, Homo sapiens
cctgtgttgagctccactc

SEQ ID NO: 5889 - DNA, 19 bp, Homo sapiens
acctgtgttgagctccact

SEQ ID NO: 5890 - DNA, 19 bp, Homo sapiens
tacctgtgttgagctccac

SEQ ID NO: 5891 - DNA, 19 bp, Homo sapiens
atacctgtgttgagctcca

SEQ ID NO: 5892 - DNA, 19 bp, Homo sapiens
catacctgtgttgagctcc

SEQ ID NO: 5893 - DNA, 19 bp, Homo sapiens
ccatacctgtgttgagctc

SEQ ID NO: 5894 - DNA, 19 bp, Homo sapiens
cccatacctgtgttgagct

SEQ ID NO: 5895 - DNA, 19 bp, Homo sapiens
ccccatacctgtgttgagc

SEQ ID NO: 5896 - DNA, 19 bp, Homo sapiens
tccccatacctgtgttgag

SEQ ID NO: 5897 - DNA, 19 bp, Homo sapiens
gtccccatacctgtgttga

SEQ ID NO: 5898 - DNA, 19 bp, Homo sapiens
tgtccccatacctgtgttg

SEQ ID NO: 5899 - DNA, 19 bp, Homo sapiens
ctgtccccatacctgtgtt

SEQ ID NO: 5900 - DNA, 19 bp, Homo sapiens
gctgtccccatacctgtgt

SEQ ID NO: 5901 - DNA, 19 bp, Homo sapiens
ggctgtccccatacctgtg

SEQ ID NO: 5902 - DNA, 19 bp, Homo sapiens
cggctgtccccatacctgt

SEQ ID NO: 5903 - DNA, 19 bp, Homo sapiens
acggctgtccccatacctg

SEQ ID NO: 5904 - DNA, 19 bp, Homo sapiens
aacggctgtccccatacct

SEQ ID NO: 5905 - DNA, 19 bp, Homo sapiens
caacggctgtccccatacc

SEQ ID NO: 5906 - DNA, 19 bp, Homo sapiens
ccaacggctgtccccatac

SEQ ID NO: 5907 - DNA, 19 bp, Homo sapiens
gccaacggctgtccccata

SEQ ID NO: 5908 - DNA, 19 bp, Homo sapiens
ggccaacggctgtccccat

SEQ ID NO: 5909 - DNA, 19 bp, Homo sapiens
aggccaacggctgtcccca

SEQ ID NO: 5910 - DNA, 19 bp, Homo sapiens
gaggccaacggctgtcccc

SEQ ID NO: 5911 - DNA, 19 bp, Homo sapiens
tgaggccaacggctgtccc

SEQ ID NO: 5912 - DNA, 19 bp, Homo sapiens
atgaggccaacggctgtcc

SEQ ID NO: 5913 - DNA, 19 bp, Homo sapiens
catgaggccaacggctgtc

SEQ ID NO: 5914 - DNA, 19 bp, Homo sapiens
ccatgaggccaacggctgt

SEQ ID NO: 5915 - DNA, 19 bp, Homo sapiens
gccatgaggccaacggctg

SEQ ID NO: 5916 - DNA, 19 bp, Homo sapiens
ggccatgaggccaacggct

SEQ ID NO: 5917 - DNA, 19 bp, Homo sapiens
cggccatgaggccaacggc

SEQ ID NO: 5918 - DNA, 19 bp, Homo sapiens
gcggccatgaggccaacgg

SEQ ID NO: 5919 - DNA, 19 bp, Homo sapiens
tgcggccatgaggccaacg

SEQ ID NO: 5920 - DNA, 19 bp, Homo sapiens
ctgcggccatgaggccaac

SEQ ID NO: 5921 - DNA, 19 bp, Homo sapiens
cctgcggccatgaggccaa

SEQ ID NO: 5922 - DNA, 19 bp, Homo sapiens
ccctgcggccatgaggcca

SEQ ID NO: 5923 - DNA, 19 bp, Homo sapiens
cccctgcggccatgaggcc

SEQ ID NO: 5924 - DNA, 19 bp, Homo sapiens
gcccctgcggccatgaggc

SEQ ID NO: 5925 - DNA, 19 bp, Homo sapiens
ggcccctgcggccatgagg

SEQ ID NO: 5926 - DNA, 19 bp, Homo sapiens
cggcccctgcggccatgag

SEQ ID NO: 5927 - DNA, 19 bp, Homo sapiens
gcggcccctgcggccatga

SEQ ID NO: 5928 - DNA, 19 bp, Homo sapiens
tgcggcccctgcggccatg

SEQ ID NO: 5929 - DNA, 19 bp, Homo sapiens
ctgcggcccctgcggccat

SEQ ID NO: 5930 - DNA, 19 bp, Homo sapiens
cctgcggcccctgcggcca

SEQ ID NO: 5931 - DNA, 19 bp, Homo sapiens
tcctgcggcccctgcggcc

SEQ ID NO: 5932 - DNA, 19 bp, Homo sapiens
ctcctgcggcccctgcggc

SEQ ID NO: 5933 - DNA, 19 bp, Homo sapiens
gctcctgcggcccctgcgg

SEQ ID NO: 5934 - DNA, 19 bp, Homo sapiens
ggctcctgcggcccctgcg

SEQ ID NO: 5935 - DNA, 19 bp, Homo sapiens
aggctcctgcggcccctgc

SEQ ID NO: 5936 - DNA, 19 bp, Homo sapiens
gaggctcctgcggcccctg

SEQ ID NO: 5937 - DNA, 19 bp, Homo sapiens
tgaggctcctgcggcccct

SEQ ID NO: 5938 - DNA, 19 bp, Homo sapiens
ctgaggctcctgcggcccc

SEQ ID NO: 5939 - DNA, 19 bp, Homo sapiens
cctgaggctcctgcggccc

SEQ ID NO: 5940 - DNA, 19 bp, Homo sapiens
ccctgaggctcctgcggcc

SEQ ID NO: 5941 - DNA, 19 bp, Homo sapiens
cccctgaggctcctgcggc

SEQ ID NO: 5942 - DNA, 19 bp, Homo sapiens
gcccctgaggctcctgcgg

SEQ ID NO: 5943 - DNA, 19 bp, Homo sapiens
ggcccctgaggctcctgcg

SEQ ID NO: 5944 - DNA, 19 bp, Homo sapiens
cggcccctgaggctcctgc

SEQ ID NO: 5945 - DNA, 19 bp, Homo sapiens
gcggcccctgaggctcctg

SEQ ID NO: 5946 - DNA, 19 bp, Homo sapiens
tgcggcccctgaggctcct

SEQ ID NO: 5947 - DNA, 19 bp, Homo sapiens
ttgcggcccctgaggctcc

SEQ ID NO: 5948 - DNA, 19 bp, Homo sapiens
cttgcggcccctgaggctc

SEQ ID NO: 5949 - DNA, 19 bp, Homo sapiens
ccttgcggcccctgaggct

SEQ ID NO: 5950 - DNA, 19 bp, Homo sapiens
tccttgcggcccctgaggc

SEQ ID NO: 5951 - DNA, 19 bp, Homo sapiens
ttccttgcggcccctgagg

SEQ ID NO: 5952 - DNA, 19 bp, Homo sapiens
cttccttgcggcccctgag

SEQ ID NO: 5953 - DNA, 19 bp, Homo sapiens
tcttccttgcggcccctga

SEQ ID NO: 5954 - DNA, 19 bp, Homo sapiens
ctcttccttgcggcccctg

SEQ ID NO: 5955 - DNA, 19 bp, Homo sapiens
cctcttccttgcggcccct

SEQ ID NO: 5956 - DNA, 19 bp, Homo sapiens
tcctcttccttgcggcccc

SEQ ID NO: 5957 - DNA, 19 bp, Homo sapiens
ctcctcttccttgcggccc

SEQ ID NO: 5958 - DNA, 19 bp, Homo sapiens
gctcctcttccttgcggcc

SEQ ID NO: 5959 - DNA, 19 bp, Homo sapiens
agctcctcttccttgcggc

SEQ ID NO: 5960 - DNA, 19 bp, Homo sapiens
gagctcctcttccttgcgg

SEQ ID NO: 5961 - DNA, 19 bp, Homo sapiens
agagctcctcttccttgcg

SEQ ID NO: 5962 - DNA, 19 bp, Homo sapiens
tagagctcctcttccttgc

SEQ ID NO: 5963 - DNA, 19 bp, Homo sapiens
gtagagctcctcttccttg

SEQ ID NO: 5964 - DNA, 19 bp, Homo sapiens
ggtagagctcctcttcctt

SEQ ID NO: 5965 - DNA, 19 bp, Homo sapiens
tggtagagctcctcttcct

SEQ ID NO: 5966 - DNA, 19 bp, Homo sapiens
atggtagagctcctcttcc

SEQ ID NO: 5967 - DNA, 19 bp, Homo sapiens
catggtagagctcctcttc

SEQ ID NO: 5968 - DNA, 19 bp, Homo sapiens
ccatggtagagctcctctt

SEQ ID NO: 5969 - DNA, 19 bp, Homo sapiens
cccatggtagagctcctct

SEQ ID NO: 5970 - DNA, 19 bp, Homo sapiens
tcccatggtagagctcctc

SEQ ID NO: 5971 - DNA, 19 bp, Homo sapiens
ttcccatggtagagctcct

SEQ ID NO: 5972 - DNA, 19 bp, Homo sapiens
gttcccatggtagagctcc

SEQ ID NO: 5973 - DNA, 19 bp, Homo sapiens
ggttcccatggtagagctc

SEQ ID NO: 5974 - DNA, 19 bp, Homo sapiens
gggttcccatggtagagct

SEQ ID NO: 5975 - DNA, 19 bp, Homo sapiens
agggttcccatggtagagc

SEQ ID NO: 5976 - DNA, 19 bp, Homo sapiens
cagggttcccatggtagag

SEQ ID NO: 5977 - DNA, 19 bp, Homo sapiens
gcagggttcccatggtaga

SEQ ID NO: 5978 - DNA, 19 bp, Homo sapiens
cgcagggttcccatggtag

SEQ ID NO: 5979 - DNA, 19 bp, Homo sapiens
ccgcagggttcccatggta

SEQ ID NO: 5980 - DNA, 19 bp, Homo sapiens
cccgcagggttcccatggt

SEQ ID NO: 5981 - DNA, 19 bp, Homo sapiens
tcccgcagggttcccatgg

SEQ ID NO: 5982 - DNA, 19 bp, Homo sapiens
gtcccgcagggttcccatg

SEQ ID NO: 5983 - DNA, 19 bp, Homo sapiens
agtcccgcagggttcccat

SEQ ID NO: 5984 - DNA, 19 bp, Homo sapiens
tagtcccgcagggttccca

SEQ ID NO: 5985 - DNA, 19 bp, Homo sapiens
gtagtcccgcagggttccc

SEQ ID NO: 5986 - DNA, 19 bp, Homo sapiens
cgtagtcccgcagggttcc

SEQ ID NO: 5987 - DNA, 19 bp, Homo sapiens
gcgtagtcccgcagggttc

SEQ ID NO: 5988 - DNA, 19 bp, Homo sapiens
agcgtagtcccgcagggtt

SEQ ID NO: 5989 - DNA, 19 bp, Homo sapiens
cagcgtagtcccgcagggt

SEQ ID NO: 5990 - DNA, 19 bp, Homo sapiens
tcagcgtagtcccgcaggg

SEQ ID NO: 5991 - DNA, 19 bp, Homo sapiens
gtcagcgtagtcccgcagg

SEQ ID NO: 5992 - DNA, 19 bp, Homo sapiens
cgtcagcgtagtcccgcag

SEQ ID NO: 5993 - DNA, 19 bp, Homo sapiens
gcgtcagcgtagtcccgca

SEQ ID NO: 5994 - DNA, 19 bp, Homo sapiens
tgcgtcagcgtagtcccgc

SEQ ID NO: 5995 - DNA, 19 bp, Homo sapiens
ctgcgtcagcgtagtcccg

SEQ ID NO: 5996 - DNA, 19 bp, Homo sapiens
tctgcgtcagcgtagtccc

SEQ ID NO: 5997 - DNA, 19 bp, Homo sapiens
gtctgcgtcagcgtagtcc

SEQ ID NO: 5998 - DNA, 19 bp, Homo sapiens
tgtctgcgtcagcgtagtc

SEQ ID NO: 5999 - DNA, 19 bp, Homo sapiens
atgtctgcgtcagcgtagt

SEQ ID NO: 6000 - DNA, 19 bp, Homo sapiens
gatgtctgcgtcagcgtag

SEQ ID NO: 6001 - DNA, 19 bp, Homo sapiens
tgatgtctgcgtcagcgta

SEQ ID NO: 6002 - DNA, 19 bp, Homo sapiens
ttgatgtctgcgtcagcgt

SEQ ID NO: 6003 - DNA, 19 bp, Homo sapiens
gttgatgtctgcgtcagcg

SEQ ID NO: 6004 - DNA, 19 bp, Homo sapiens
tgttgatgtctgcgtcagc

SEQ ID NO: 6005 - DNA, 19 bp, Homo sapiens
atgttgatgtctgcgtcag

SEQ ID NO: 6006 - DNA, 19 bp, Homo sapiens
catgttgatgtctgcgtca

SEQ ID NO: 6007 - DNA, 19 bp, Homo sapiens
ccatgttgatgtctgcgtc

SEQ ID NO: 6008 - DNA, 19 bp, Homo sapiens
gccatgttgatgtctgcgt

SEQ ID NO: 6009 - DNA, 19 bp, Homo sapiens
agccatgttgatgtctgcg

SEQ ID NO: 6010 - DNA, 19 bp, Homo sapiens
aagccatgttgatgtctgc

SEQ ID NO: 6011 - DNA, 19 bp, Homo sapiens
aaagccatgttgatgtctg

SEQ ID NO: 6012 - DNA, 19 bp, Homo sapiens
gaaagccatgttgatgtct

SEQ ID NO: 6013 - DNA, 19 bp, Homo sapiens
agaaagccatgttgatgtc

SEQ ID NO: 6014 - DNA, 19 bp, Homo sapiens
aagaaagccatgttgatgt

SEQ ID NO: 6015 - DNA, 19 bp, Homo sapiens
caagaaagccatgttgatg

SEQ ID NO: 6016 - DNA, 19 bp, Homo sapiens
ccaagaaagccatgttgat

SEQ ID NO: 6017 - DNA, 19 bp, Homo sapiens
tccaagaaagccatgttga

SEQ ID NO: 6018 - DNA, 19 bp, Homo sapiens
gtccaagaaagccatgttg

SEQ ID NO: 6019 - DNA, 19 bp, Homo sapiens
tgtccaagaaagccatgtt

SEQ ID NO: 6020 - DNA, 19 bp, Homo sapiens
ctgtccaagaaagccatgt

SEQ ID NO: 6021 - DNA, 19 bp, Homo sapiens
gctgtccaagaaagccatg

SEQ ID NO: 6022 - DNA, 19 bp, Homo sapiens
agctgtccaagaaagccat

SEQ ID NO: 6023 - DNA, 19 bp, Homo sapiens
tagctgtccaagaaagcca

SEQ ID NO: 6024 - DNA, 19 bp, Homo sapiens
gtagctgtccaagaaagcc

SEQ ID NO: 6025 - DNA, 19 bp, Homo sapiens
agtagctgtccaagaaagc

SEQ ID NO: 6026 - DNA, 19 bp, Homo sapiens
aagtagctgtccaagaaag

SEQ ID NO: 6027 - DNA, 19 bp, Homo sapiens
gaagtagctgtccaagaaa

SEQ ID NO: 6028 - DNA, 19 bp, Homo sapiens
agaagtagctgtccaagaa

SEQ ID NO: 6029 - DNA, 19 bp, Homo sapiens
gagaagtagctgtccaaga

SEQ ID NO: 6030 - DNA, 19 bp, Homo sapiens
cgagaagtagctgtccaag

SEQ ID NO: 6031 - DNA, 19 bp, Homo sapiens
ccgagaagtagctgtccaa

SEQ ID NO: 6032 - DNA, 19 bp, Homo sapiens
tccgagaagtagctgtcca

SEQ ID NO: 6033 - DNA, 19 bp, Homo sapiens
ctccgagaagtagctgtcc

SEQ ID NO: 6034 - DNA, 19 bp, Homo sapiens
tctccgagaagtagctgtc

SEQ ID NO: 6035 - DNA, 19 bp, Homo sapiens
ttctccgagaagtagctgt

SEQ ID NO: 6036 - DNA, 19 bp, Homo sapiens
tttctccgagaagtagctg

SEQ ID NO: 6037 - DNA, 19 bp, Homo sapiens
ctttctccgagaagtagct

SEQ ID NO: 6038 - DNA, 19 bp, Homo sapiens
gctttctccgagaagtagc

SEQ ID NO: 6039 - DNA, 19 bp, Homo sapiens
cgctttctccgagaagtag

SEQ ID NO: 6040 - DNA, 19 bp, Homo sapiens
acgctttctccgagaagta

SEQ ID NO: 6041 - DNA, 19 bp, Homo sapiens
tacgctttctccgagaagt

SEQ ID NO: 6042 - DNA, 19 bp, Homo sapiens
atacgctttctccgagaag

SEQ ID NO: 6043 - DNA, 19 bp, Homo sapiens
catacgctttctccgagaa

SEQ ID NO: 6044 - DNA, 19 bp, Homo sapiens
gcatacgctttctccgaga

SEQ ID NO: 6045 - DNA, 19 bp, Homo sapiens
agcatacgctttctccgag

SEQ ID NO: 6046 - DNA, 19 bp, Homo sapiens
aagcatacgctttctccga

SEQ ID NO: 6047 - DNA, 19 bp, Homo sapiens
taagcatacgctttctccg

SEQ ID NO: 6048 - DNA, 19 bp, Homo sapiens
ataagcatacgctttctcc

SEQ ID NO: 6049 - DNA, 19 bp, Homo sapiens
cataagcatacgctttctc

SEQ ID NO: 6050 - DNA, 19 bp, Homo sapiens
gcataagcatacgctttct

SEQ ID NO: 6051 - DNA, 19 bp, Homo sapiens
tgcataagcatacgctttc

SEQ ID NO: 6052 - DNA, 19 bp, Homo sapiens
ctgcataagcatacgcttt

SEQ ID NO: 6053 - DNA, 19 bp, Homo sapiens
tctgcataagcatacgctt

SEQ ID NO: 6054 - DNA, 19 bp, Homo sapiens
atctgcataagcatacgct

SEQ ID NO: 6055 - DNA, 19 bp, Homo sapiens
catctgcataagcatacgc

SEQ ID NO: 6056 - DNA, 19 bp, Homo sapiens
tcatctgcataagcatacg

SEQ ID NO: 6057 - DNA, 19 bp, Homo sapiens
ttcatctgcataagcatac

SEQ ID NO: 6058 - DNA, 19 bp, Homo sapiens
cttcatctgcataagcata

SEQ ID NO: 6059 - DNA, 19 bp, Homo sapiens
tcttcatctgcataagcat

SEQ ID NO: 6060 - DNA, 19 bp, Homo sapiens
atcttcatctgcataagca

SEQ ID NO: 6061 - DNA, 19 bp, Homo sapiens
catcttcatctgcataagc

SEQ ID NO: 6062 - DNA, 19 bp, Homo sapiens
tcatcttcatctgcataag

SEQ ID NO: 6063 - DNA, 19 bp, Homo sapiens
ttcatcttcatctgcataa

SEQ ID NO: 6064 - DNA, 19 bp, Homo sapiens
cttcatcttcatctgcata

SEQ ID NO: 6065 - DNA, 19 bp, Homo sapiens
ccttcatcttcatctgcat

SEQ ID NO: 6066 - DNA, 19 bp, Homo sapiens
accttcatcttcatctgca

SEQ ID NO: 6067 - DNA, 19 bp, Homo sapiens
gaccttcatcttcatctgc

SEQ ID NO: 6068 - DNA, 19 bp, Homo sapiens
cgaccttcatcttcatctg

SEQ ID NO: 6069 - DNA, 19 bp, Homo sapiens
tcgaccttcatcttcatct

SEQ ID NO: 6070 - DNA, 19 bp, Homo sapiens
gtcgaccttcatcttcatc

SEQ ID NO: 6071 - DNA, 19 bp, Homo sapiens
ggtcgaccttcatcttcat

SEQ ID NO: 6072 - DNA, 19 bp, Homo sapiens
tggtcgaccttcatcttca

SEQ ID NO: 6073 - DNA, 19 bp, Homo sapiens
ctggtcgaccttcatcttc

SEQ ID NO: 6074 - DNA, 19 bp, Homo sapiens
gctggtcgaccttcatctt

SEQ ID NO: 6075 - DNA, 19 bp, Homo sapiens
ggctggtcgaccttcatct

SEQ ID NO: 6076 - DNA, 19 bp, Homo sapiens
tggctggtcgaccttcatc

SEQ ID NO: 6077 - DNA, 19 bp, Homo sapiens
ttggctggtcgaccttcat

SEQ ID NO: 6078 - DNA, 19 bp, Homo sapiens
attggctggtcgaccttca

SEQ ID NO: 6079 - DNA, 19 bp, Homo sapiens
cattggctggtcgaccttc

SEQ ID NO: 6080 - DNA, 19 bp, Homo sapiens
tcattggctggtcgacctt

SEQ ID NO: 6081 - DNA, 19 bp, Homo sapiens
gtcattggctggtcgacct

SEQ ID NO: 6082 - DNA, 19 bp, Homo sapiens
agtcattggctggtcgacc

SEQ ID NO: 6083 - DNA, 19 bp, Homo sapiens
cagtcattggctggtcgac

SEQ ID NO: 6084 - DNA, 19 bp, Homo sapiens
gcagtcattggctggtcga

SEQ ID NO: 6085 - DNA, 19 bp, Homo sapiens
agcagtcattggctggtcg

SEQ ID NO: 6086 - DNA, 19 bp, Homo sapiens
aagcagtcattggctggtc

SEQ ID NO: 6087 - DNA, 19 bp, Homo sapiens
caagcagtcattggctggt

SEQ ID NO: 6088 - DNA, 19 bp, Homo sapiens
gcaagcagtcattggctgg

SEQ ID NO: 6089 - DNA, 19 bp, Homo sapiens
agcaagcagtcattggctg

SEQ ID NO: 6090 - DNA, 19 bp, Homo sapiens
gagcaagcagtcattggct

SEQ ID NO: 6091 - DNA, 19 bp, Homo sapiens
tgagcaagcagtcattggc

SEQ ID NO: 6092 - DNA, 19 bp, Homo sapiens
atgagcaagcagtcattgg

SEQ ID NO: 6093 - DNA, 19 bp, Homo sapiens
aatgagcaagcagtcattg

SEQ ID NO: 6094 - DNA, 19 bp, Homo sapiens
aaatgagcaagcagtcatt

SEQ ID NO: 6095 - DNA, 19 bp, Homo sapiens
taaatgagcaagcagtcat

SEQ ID NO: 6096 - DNA, 19 bp, Homo sapiens
ataaatgagcaagcagtca

SEQ ID NO: 6097 - DNA, 19 bp, Homo sapiens
cataaatgagcaagcagtc

SEQ ID NO: 6098 - DNA, 19 bp, Homo sapiens
tcataaatgagcaagcagt

SEQ ID NO: 6099 - DNA, 19 bp, Homo sapiens
gtcataaatgagcaagcag

SEQ ID NO: 6100 - DNA, 19 bp, Homo sapiens
ggtcataaatgagcaagca

SEQ ID NO: 6101 - DNA, 19 bp, Homo sapiens
tggtcataaatgagcaagc

SEQ ID NO: 6102 - DNA, 19 bp, Homo sapiens
gtggtcataaatgagcaag

SEQ ID NO: 6103 - DNA, 19 bp, Homo sapiens
cgtggtcataaatgagcaa

SEQ ID NO: 6104 - DNA, 19 bp, Homo sapiens
tcgtggtcataaatgagca

SEQ ID NO: 6105 - DNA, 19 bp, Homo sapiens
ctcgtggtcataaatgagc

SEQ ID NO: 6106 - DNA, 19 bp, Homo sapiens
cctcgtggtcataaatgag

SEQ ID NO: 6107 - DNA, 19 bp, Homo sapiens
ccctcgtggtcataaatga

SEQ ID NO: 6108 - DNA, 19 bp, Homo sapiens
tccctcgtggtcataaatg

SEQ ID NO: 6109 - DNA, 19 bp, Homo sapiens
ctccctcgtggtcataaat

SEQ ID NO: 6110 - DNA, 19 bp, Homo sapiens
actccctcgtggtcataaa

SEQ ID NO: 6111 - DNA, 19 bp, Homo sapiens
gactccctcgtggtcataa

SEQ ID NO: 6112 - DNA, 19 bp, Homo sapiens
cgactccctcgtggtcata

SEQ ID NO: 6113 - DNA, 19 bp, Homo sapiens
ccgactccctcgtggtcat

SEQ ID NO: 6114 - DNA, 19 bp, Homo sapiens
cccgactccctcgtggtca

SEQ ID NO: 6115 - DNA, 19 bp, Homo sapiens
acccgactccctcgtggtc

SEQ ID NO: 6116 - DNA, 19 bp, Homo sapiens
gacccgactccctcgtggt

SEQ ID NO: 6117 - DNA, 19 bp, Homo sapiens
agacccgactccctcgtgg

SEQ ID NO: 6118 - DNA, 19 bp, Homo sapiens
gagacccgactccctcgtg

SEQ ID NO: 6119 - DNA, 19 bp, Homo sapiens
ggagacccgactccctcgt

SEQ ID NO: 6120 - DNA, 19 bp, Homo sapiens
gggagacccgactccctcg

SEQ ID NO: 6121 - DNA, 19 bp, Homo sapiens
cgggagacccgactccctc

SEQ ID NO: 6122 - DNA, 19 bp, Homo sapiens
acgggagacccgactccct

SEQ ID NO: 6123 - DNA, 19 bp, Homo sapiens
tacgggagacccgactccc

SEQ ID NO: 6124 - DNA, 19 bp, Homo sapiens
ctacgggagacccgactcc

SEQ ID NO: 6125 - DNA, 19 bp, Homo sapiens
cctacgggagacccgactc

SEQ ID NO: 6126 - DNA, 19 bp, Homo sapiens
gcctacgggagacccgact

SEQ ID NO: 6127 - DNA, 19 bp, Homo sapiens
agcctacgggagacccgac

SEQ ID NO: 6128 - DNA, 19 bp, Homo sapiens
gagcctacgggagacccga

SEQ ID NO: 6129 - DNA, 19 bp, Homo sapiens
agagcctacgggagacccg

SEQ ID NO: 6130 - DNA, 19 bp, Homo sapiens
tagagcctacgggagaccc

SEQ ID NO: 6131 - DNA, 19 bp, Homo sapiens
atagagcctacgggagacc

SEQ ID NO: 6132 - DNA, 19 bp, Homo sapiens
aatagagcctacgggagac

SEQ ID NO: 6133 - DNA, 19 bp, Homo sapiens
caatagagcctacgggaga

SEQ ID NO: 6134 - DNA, 19 bp, Homo sapiens
ccaatagagcctacgggag

SEQ ID NO: 6135 - DNA, 19 bp, Homo sapiens
accaatagagcctacggga

SEQ ID NO: 6136 - DNA, 19 bp, Homo sapiens
aaccaatagagcctacggg

SEQ ID NO: 6137 - DNA, 19 bp, Homo sapiens
caaccaatagagcctacgg

SEQ ID NO: 6138 - DNA, 19 bp, Homo sapiens
acaaccaatagagcctacg

SEQ ID NO: 6139 - DNA, 19 bp, Homo sapiens
aacaaccaatagagcctac

SEQ ID NO: 6140 - DNA, 19 bp, Homo sapiens
caacaaccaatagagccta

SEQ ID NO: 6141 - DNA, 19 bp, Homo sapiens
gcaacaaccaatagagcct

SEQ ID NO: 6142 - DNA, 19 bp, Homo sapiens
tgcaacaaccaatagagcc

SEQ ID NO: 6143 - DNA, 19 bp, Homo sapiens
ctgcaacaaccaatagagc

SEQ ID NO: 6144 - DNA, 19 bp, Homo sapiens
actgcaacaaccaatagag

SEQ ID NO: 6145 - DNA, 19 bp, Homo sapiens
aactgcaacaaccaataga

SEQ ID NO: 6146 - DNA, 19 bp, Homo sapiens
caactgcaacaaccaatag

SEQ ID NO: 6147 - DNA, 19 bp, Homo sapiens
ccaactgcaacaaccaata

SEQ ID NO: 6148 - DNA, 19 bp, Homo sapiens
tccaactgcaacaaccaat

SEQ ID NO: 6149 - DNA, 19 bp, Homo sapiens
atccaactgcaacaaccaa

SEQ ID NO: 6150 - DNA, 19 bp, Homo sapiens
aatccaactgcaacaacca

SEQ ID NO: 6151 - DNA, 19 bp, Homo sapiens
caatccaactgcaacaacc

SEQ ID NO: 6152 - DNA, 19 bp, Homo sapiens
acaatccaactgcaacaac

SEQ ID NO: 6153 - DNA, 19 bp, Homo sapiens
cacaatccaactgcaacaa

SEQ ID NO: 6154 - DNA, 19 bp, Homo sapiens
ccacaatccaactgcaaca

SEQ ID NO: 6155 - DNA, 19 bp, Homo sapiens
tccacaatccaactgcaac

SEQ ID NO: 6156 - DNA, 19 bp, Homo sapiens
atccacaatccaactgcaa

SEQ ID NO: 6157 - DNA, 19 bp, Homo sapiens
catccacaatccaactgca

SEQ ID NO: 6158 - DNA, 19 bp, Homo sapiens
tcatccacaatccaactgc

SEQ ID NO: 6159 - DNA, 19 bp, Homo sapiens
gtcatccacaatccaactg

SEQ ID NO: 6160 - DNA, 19 bp, Homo sapiens
agtcatccacaatccaact

SEQ ID NO: 6161 - DNA, 19 bp, Homo sapiens
aagtcatccacaatccaac

SEQ ID NO: 6162 - DNA, 19 bp, Homo sapiens
taagtcatccacaatccaa

SEQ ID NO: 6163 - DNA, 19 bp, Homo sapiens
ctaagtcatccacaatcca

SEQ ID NO: 6164 - DNA, 19 bp, Homo sapiens
tctaagtcatccacaatcc

SEQ ID NO: 6165 - DNA, 19 bp, Homo sapiens
atctaagtcatccacaatc

SEQ ID NO: 6166 - DNA, 19 bp, Homo sapiens
catctaagtcatccacaat

SEQ ID NO: 6167 - DNA, 19 bp, Homo sapiens
tcatctaagtcatccacaa

SEQ ID NO: 6168 - DNA, 19 bp, Homo sapiens
ttcatctaagtcatccaca

SEQ ID NO: 6169 - DNA, 19 bp, Homo sapiens
tttcatctaagtcatccac

SEQ ID NO: 6170 - DNA, 19 bp, Homo sapiens
ctttcatctaagtcatcca

SEQ ID NO: 6171 - DNA, 19 bp, Homo sapiens
gctttcatctaagtcatcc

SEQ ID NO: 6172 - DNA, 19 bp, Homo sapiens
agctttcatctaagtcatc

SEQ ID NO: 6173 - DNA, 19 bp, Homo sapiens
cagctttcatctaagtcat

SEQ ID NO: 6174 - DNA, 19 bp, Homo sapiens
gcagctttcatctaagtca

SEQ ID NO: 6175 - DNA, 19 bp, Homo sapiens
tgcagctttcatctaagtc

SEQ ID NO: 6176 - DNA, 19 bp, Homo sapiens
atgcagctttcatctaagt

SEQ ID NO: 6177 - DNA, 19 bp, Homo sapiens
catgcagctttcatctaag

SEQ ID NO: 6178 - DNA, 19 bp, Homo sapiens
ccatgcagctttcatctaa

SEQ ID NO: 6179 - DNA, 19 bp, Homo sapiens
tccatgcagctttcatcta

SEQ ID NO: 6180 - DNA, 19 bp, Homo sapiens
ttccatgcagctttcatct

SEQ ID NO: 6181 - DNA, 19 bp, Homo sapiens
tttccatgcagctttcatc

SEQ ID NO: 6182 - DNA, 19 bp, Homo sapiens
gtttccatgcagctttcat

SEQ ID NO: 6183 - DNA, 19 bp, Homo sapiens
agtttccatgcagctttca

SEQ ID NO: 6184 - DNA, 19 bp, Homo sapiens
aagtttccatgcagctttc

SEQ ID NO: 6185 - DNA, 19 bp, Homo sapiens
aaagtttccatgcagcttt

SEQ ID NO: 6186 - DNA, 19 bp, Homo sapiens
taaagtttccatgcagctt

SEQ ID NO: 6187 - DNA, 19 bp, Homo sapiens
ctaaagtttccatgcagct

SEQ ID NO: 6188 - DNA, 19 bp, Homo sapiens
tctaaagtttccatgcagc

SEQ ID NO: 6189 - DNA, 19 bp, Homo sapiens
atctaaagtttccatgcag

SEQ ID NO: 6190 - DNA, 19 bp, Homo sapiens
gatctaaagtttccatgca

SEQ ID NO: 6191 - DNA, 19 bp, Homo sapiens
ggatctaaagtttccatgc

SEQ ID NO: 6192 - DNA, 19 bp, Homo sapiens
tggatctaaagtttccatg

SEQ ID NO: 6193 - DNA, 19 bp, Homo sapiens
ttggatctaaagtttccat

SEQ ID NO: 6194 - DNA, 19 bp, Homo sapiens
tttggatctaaagtttcca

SEQ ID NO: 6195 - DNA, 19 bp, Homo sapiens
ttttggatctaaagtttcc

SEQ ID NO: 6196 - DNA, 19 bp, Homo sapiens
attttggatctaaagtttc

SEQ ID NO: 6197 - DNA, 19 bp, Homo sapiens
aattttggatctaaagttt

SEQ ID NO: 6198 - DNA, 19 bp, Homo sapiens
aaattttggatctaaagtt

SEQ ID NO: 6199 - DNA, 19 bp, Homo sapiens
taaattttggatctaaagt

SEQ ID NO: 6200 - DNA, 19 bp, Homo sapiens
ctaaattttggatctaaag

SEQ ID NO: 6201 - DNA, 19 bp, Homo sapiens
cctaaattttggatctaaa

SEQ ID NO: 6202 - DNA, 19 bp, Homo sapiens
tcctaaattttggatctaa

SEQ ID NO: 6203 - DNA, 19 bp, Homo sapiens
gtcctaaattttggatcta

SEQ ID NO: 6204 - DNA, 19 bp, Homo sapiens
agtcctaaattttggatct

SEQ ID NO: 6205 - DNA, 19 bp, Homo sapiens
gagtcctaaattttggatc

SEQ ID NO: 6206 - DNA, 19 bp, Homo sapiens
agagtcctaaattttggat

SEQ ID NO: 6207 - DNA, 19 bp, Homo sapiens
aagagtcctaaattttgga

SEQ ID NO: 6208 - DNA, 19 bp, Homo sapiens
caagagtcctaaattttgg

SEQ ID NO: 6209 - DNA, 19 bp, Homo sapiens
gcaagagtcctaaattttg

SEQ ID NO: 6210 - DNA, 19 bp, Homo sapiens
agcaagagtcctaaatttt

SEQ ID NO: 6211 - DNA, 19 bp, Homo sapiens
cagcaagagtcctaaattt

SEQ ID NO: 6212 - DNA, 19 bp, Homo sapiens
tcagcaagagtcctaaatt

SEQ ID NO: 6213 - DNA, 19 bp, Homo sapiens
ctcagcaagagtcctaaat

SEQ ID NO: 6214 - DNA, 19 bp, Homo sapiens
tctcagcaagagtcctaaa

SEQ ID NO: 6215 - DNA, 19 bp, Homo sapiens
atctcagcaagagtcctaa

SEQ ID NO: 6216 - DNA, 19 bp, Homo sapiens
gatctcagcaagagtccta

SEQ ID NO: 6217 - DNA, 19 bp, Homo sapiens
agatctcagcaagagtcct

SEQ ID NO: 6218 - DNA, 19 bp, Homo sapiens
cagatctcagcaagagtcc

SEQ ID NO: 6219 - DNA, 19 bp, Homo sapiens
gcagatctcagcaagagtc

SEQ ID NO: 6220 - DNA, 19 bp, Homo sapiens
agcagatctcagcaagagt

SEQ ID NO: 6221 - DNA, 19 bp, Homo sapiens
aagcagatctcagcaagag

SEQ ID NO: 6222 - DNA, 19 bp, Homo sapiens
taagcagatctcagcaaga

SEQ ID NO: 6223 - DNA, 19 bp, Homo sapiens
ttaagcagatctcagcaag

SEQ ID NO: 6224 - DNA, 19 bp, Homo sapiens
tttaagcagatctcagcaa

SEQ ID NO: 6225 - DNA, 19 bp, Homo sapiens
gtttaagcagatctcagca

SEQ ID NO: 6226 - DNA, 19 bp, Homo sapiens
tgtttaagcagatctcagc

SEQ ID NO: 6227 - DNA, 19 bp, Homo sapiens
gtgtttaagcagatctcag

SEQ ID NO: 6228 - DNA, 19 bp, Homo sapiens
tgtgtttaagcagatctca

SEQ ID NO: 6229 - DNA, 19 bp, Homo sapiens
ctgtgtttaagcagatctc

SEQ ID NO: 6230 - DNA, 19 bp, Homo sapiens
tctgtgtttaagcagatct

SEQ ID NO: 6231 - DNA, 19 bp, Homo sapiens
ttctgtgtttaagcagatc

SEQ ID NO: 6232 - DNA, 19 bp, Homo sapiens
tttctgtgtttaagcagat

SEQ ID NO: 6233 - DNA, 19 bp, Homo sapiens
atttctgtgtttaagcaga

SEQ ID NO: 6234 - DNA, 19 bp, Homo sapiens
aatttctgtgtttaagcag

SEQ ID NO: 6235 - DNA, 19 bp, Homo sapiens
caatttctgtgtttaagca

SEQ ID NO: 6236 - DNA, 19 bp, Homo sapiens
tcaatttctgtgtttaagc

SEQ ID NO: 6237 - DNA, 19 bp, Homo sapiens
ttcaatttctgtgtttaag

SEQ ID NO: 6238 - DNA, 19 bp, Homo sapiens
gttcaatttctgtgtttaa

SEQ ID NO: 6239 - DNA, 19 bp, Homo sapiens
ggttcaatttctgtgttta

SEQ ID NO: 6240 - DNA, 19 bp, Homo sapiens
tggttcaatttctgtgttt

SEQ ID NO: 6241 - DNA, 19 bp, Homo sapiens
atggttcaatttctgtgtt

SEQ ID NO: 6242 - DNA, 19 bp, Homo sapiens
aatggttcaatttctgtgt

SEQ ID NO: 6243 - DNA, 19 bp, Homo sapiens
aaatggttcaatttctgtg

SEQ ID NO: 6244 - DNA, 19 bp, Homo sapiens
gaaatggttcaatttctgt

SEQ ID NO: 6245 - DNA, 19 bp, Homo sapiens
ggaaatggttcaatttctg

SEQ ID NO: 6246 - DNA, 19 bp, Homo sapiens
aggaaatggttcaatttct

SEQ ID NO: 6247 - DNA, 19 bp, Homo sapiens
aaggaaatggttcaatttc

SEQ ID NO: 6248 - DNA, 19 bp, Homo sapiens
gaaggaaatggttcaattt

SEQ ID NO: 6249 - DNA, 19 bp, Homo sapiens
tgaaggaaatggttcaatt

SEQ ID NO: 6250 - DNA, 19 bp, Homo sapiens
gtgaaggaaatggttcaat

SEQ ID NO: 6251 - DNA, 19 bp, Homo sapiens
tgtgaaggaaatggttcaa

SEQ ID NO: 6252 - DNA, 19 bp, Homo sapiens
gtgtgaaggaaatggttca

SEQ ID NO: 6253 - DNA, 19 bp, Homo sapiens
ggtgtgaaggaaatggttc

SEQ ID NO: 6254 - DNA, 19 bp, Homo sapiens
tggtgtgaaggaaatggtt

SEQ ID NO: 6255 - DNA, 19 bp, Homo sapiens
ctggtgtgaaggaaatggt

SEQ ID NO: 6256 - DNA, 19 bp, Homo sapiens
cctggtgtgaaggaaatgg

SEQ ID NO: 6257 - DNA, 19 bp, Homo sapiens
gcctggtgtgaaggaaatg

SEQ ID NO: 6258 - DNA, 19 bp, Homo sapiens
agcctggtgtgaaggaaat

SEQ ID NO: 6259 - DNA, 19 bp, Homo sapiens
aagcctggtgtgaaggaaa

SEQ ID NO: 6260 - DNA, 19 bp, Homo sapiens
caagcctggtgtgaaggaa

SEQ ID NO: 6261 - DNA, 19 bp, Homo sapiens
acaagcctggtgtgaagga

SEQ ID NO: 6262 - DNA, 19 bp, Homo sapiens
tacaagcctggtgtgaagg

SEQ ID NO: 6263 - DNA, 19 bp, Homo sapiens
atacaagcctggtgtgaag

SEQ ID NO: 6264 - DNA, 19 bp, Homo sapiens
tatacaagcctggtgtgaa

SEQ ID NO: 6265 - DNA, 19 bp, Homo sapiens
gtatacaagcctggtgtga

SEQ ID NO: 6266 - DNA, 19 bp, Homo sapiens
ggtatacaagcctggtgtg

SEQ ID NO: 6267 - DNA, 19 bp, Homo sapiens
tggtatacaagcctggtgt

SEQ ID NO: 6268 - DNA, 19 bp, Homo sapiens
ttggtatacaagcctggtg

SEQ ID NO: 6269 - DNA, 19 bp, Homo sapiens
attggtatacaagcctggt

SEQ ID NO: 6270 - DNA, 19 bp, Homo sapiens
gattggtatacaagcctgg

SEQ ID NO: 6271 - DNA, 19 bp, Homo sapiens
tgattggtatacaagcctg

SEQ ID NO: 6272 - DNA, 19 bp, Homo sapiens
ctgattggtatacaagcct

SEQ ID NO: 6273 - DNA, 19 bp, Homo sapiens
actgattggtatacaagcc

SEQ ID NO: 6274 - DNA, 19 bp, Homo sapiens
tactgattggtatacaagc

SEQ ID NO: 6275 - DNA, 19 bp, Homo sapiens
gtactgattggtatacaag

SEQ ID NO: 6276 - DNA, 19 bp, Homo sapiens
agtactgattggtatacaa

SEQ ID NO: 6277 - DNA, 19 bp, Homo sapiens
cagtactgattggtataca

SEQ ID NO: 6278 - DNA, 19 bp, Homo sapiens
tcagtactgattggtatac

SEQ ID NO: 6279 - DNA, 19 bp, Homo sapiens
gtcagtactgattggtata

SEQ ID NO: 6280 - DNA, 19 bp, Homo sapiens
ggtcagtactgattggtat

SEQ ID NO: 6281 - DNA, 19 bp, Homo sapiens
aggtcagtactgattggta

SEQ ID NO: 6282 - DNA, 19 bp, Homo sapiens
gaggtcagtactgattggt

SEQ ID NO: 6283 - DNA, 19 bp, Homo sapiens
ggaggtcagtactgattgg

SEQ ID NO: 6284 - DNA, 19 bp, Homo sapiens
gggaggtcagtactgattg

SEQ ID NO: 6285 - DNA, 19 bp, Homo sapiens
agggaggtcagtactgatt

SEQ ID NO: 6286 - DNA, 19 bp, Homo sapiens
aagggaggtcagtactgat

SEQ ID NO: 6287 - DNA, 19 bp, Homo sapiens
aaagggaggtcagtactga

SEQ ID NO: 6288 - DNA, 19 bp, Homo sapiens
caaagggaggtcagtactg

SEQ ID NO: 6289 - DNA, 19 bp, Homo sapiens
gcaaagggaggtcagtact

SEQ ID NO: 6290 - DNA, 19 bp, Homo sapiens
agcaaagggaggtcagtac

SEQ ID NO: 6291 - DNA, 19 bp, Homo sapiens
gagcaaagggaggtcagta

SEQ ID NO: 6292 - DNA, 19 bp, Homo sapiens
cgagcaaagggaggtcagt

SEQ ID NO: 6293 - DNA, 19 bp, Homo sapiens
ccgagcaaagggaggtcag

SEQ ID NO: 6294 - DNA, 19 bp, Homo sapiens
tccgagcaaagggaggtca

SEQ ID NO: 6295 - DNA, 19 bp, Homo sapiens
gtccgagcaaagggaggtc

SEQ ID NO: 6296 - DNA, 19 bp, Homo sapiens
ggtccgagcaaagggaggt

SEQ ID NO: 6297 - DNA, 19 bp, Homo sapiens
aggtccgagcaaagggagg

SEQ ID NO: 6298 - DNA, 19 bp, Homo sapiens
taggtccgagcaaagggag

SEQ ID NO: 6299 - DNA, 19 bp, Homo sapiens
ttaggtccgagcaaaggga

SEQ ID NO: 6300 - DNA, 19 bp, Homo sapiens
attaggtccgagcaaaggg

SEQ ID NO: 6301 - DNA, 19 bp, Homo sapiens
aattaggtccgagcaaagg

SEQ ID NO: 6302 - DNA, 19 bp, Homo sapiens
taattaggtccgagcaaag

SEQ ID NO: 6303 - DNA, 19 bp, Homo sapiens
gtaattaggtccgagcaaa

SEQ ID NO: 6304 - DNA, 19 bp, Homo sapiens
agtaattaggtccgagcaa

SEQ ID NO: 6305 - DNA, 19 bp, Homo sapiens
aagtaattaggtccgagca

SEQ ID NO: 6306 - DNA, 19 bp, Homo sapiens
aaagtaattaggtccgagc

SEQ ID NO: 6307 - DNA, 19 bp, Homo sapiens
caaagtaattaggtccgag

SEQ ID NO: 6308 - DNA, 19 bp, Homo sapiens
acaaagtaattaggtccga

SEQ ID NO: 6309 - DNA, 19 bp, Homo sapiens
aacaaagtaattaggtccg

SEQ ID NO: 6310 - DNA, 19 bp, Homo sapiens
taacaaagtaattaggtcc

SEQ ID NO: 6311 - DNA, 19 bp, Homo sapiens
ttaacaaagtaattaggtc

SEQ ID NO: 6312 - DNA, 19 bp, Homo sapiens
attaacaaagtaattaggt

SEQ ID NO: 6313 - DNA, 19 bp, Homo sapiens
cattaacaaagtaattagg

SEQ ID NO: 6314 - DNA, 19 bp, Homo sapiens
tcattaacaaagtaattag

SEQ ID NO: 6315 - DNA, 19 bp, Homo sapiens
ttcattaacaaagtaatta

SEQ ID NO: 6316 - DNA, 19 bp, Homo sapiens
attcattaacaaagtaatt

SEQ ID NO: 6317 - DNA, 19 bp, Homo sapiens
gattcattaacaaagtaat

SEQ ID NO: 6318 - DNA, 19 bp, Homo sapiens
agattcattaacaaagtaa

SEQ ID NO: 6319 - DNA, 19 bp, Homo sapiens
aagattcattaacaaagta

SEQ ID NO: 6320 - DNA, 19 bp, Homo sapiens
gaagattcattaacaaagt

SEQ ID NO: 6321 - DNA, 19 bp, Homo sapiens
tgaagattcattaacaaag

SEQ ID NO: 6322 - DNA, 19 bp, Homo sapiens
ctgaagattcattaacaaa

SEQ ID NO: 6323 - DNA, 19 bp, Homo sapiens
cctgaagattcattaacaa

SEQ ID NO: 6324 - DNA, 19 bp, Homo sapiens
tcctgaagattcattaaca

SEQ ID NO: 6325 - DNA, 19 bp, Homo sapiens
atcctgaagattcattaac

SEQ ID NO: 6326 - DNA, 19 bp, Homo sapiens
aatcctgaagattcattaa

SEQ ID NO: 6327 - DNA, 19 bp, Homo sapiens
caatcctgaagattcatta

SEQ ID NO: 6328 - DNA, 19 bp, Homo sapiens
tcaatcctgaagattcatt

SEQ ID NO: 6329 - DNA, 19 bp, Homo sapiens
gtcaatcctgaagattcat

SEQ ID NO: 6330 - DNA, 19 bp, Homo sapiens
agtcaatcctgaagattca

SEQ ID NO: 6331 - DNA, 19 bp, Homo sapiens
gagtcaatcctgaagattc

SEQ ID NO: 6332 - DNA, 19 bp, Homo sapiens
ggagtcaatcctgaagatt

SEQ ID NO: 6333 - DNA, 19 bp, Homo sapiens
gggagtcaatcctgaagat

SEQ ID NO: 6334 - DNA, 19 bp, Homo sapiens
agggagtcaatcctgaaga

SEQ ID NO: 6335 - DNA, 19 bp, Homo sapiens
gagggagtcaatcctgaag

SEQ ID NO: 6336 - DNA, 19 bp, Homo sapiens
tgagggagtcaatcctgaa

SEQ ID NO: 6337 - DNA, 19 bp, Homo sapiens
ctgagggagtcaatcctga

SEQ ID NO: 6338 - DNA, 19 bp, Homo sapiens
tctgagggagtcaatcctg

SEQ ID NO: 6339 - DNA, 19 bp, Homo sapiens
ttctgagggagtcaatcct

SEQ ID NO: 6340 - DNA, 19 bp, Homo sapiens
cttctgagggagtcaatcc

SEQ ID NO: 6341 - DNA, 19 bp, Homo sapiens
acttctgagggagtcaatc

SEQ ID NO: 6342 - DNA, 19 bp, Homo sapiens
aacttctgagggagtcaat

SEQ ID NO: 6343 - DNA, 19 bp, Homo sapiens
caacttctgagggagtcaa

SEQ ID NO: 6344 - DNA, 19 bp, Homo sapiens
tcaacttctgagggagtca

SEQ ID NO: 6345 - DNA, 19 bp, Homo sapiens
ttcaacttctgagggagtc

SEQ ID NO: 6346 - DNA, 19 bp, Homo sapiens
attcaacttctgagggagt

SEQ ID NO: 6347 - DNA, 19 bp, Homo sapiens
aattcaacttctgagggag

SEQ ID NO: 6348 - DNA, 19 bp, Homo sapiens
gaattcaacttctgaggga

SEQ ID NO: 6349 - DNA, 19 bp, Homo sapiens
ggaattcaacttctgaggg

SEQ ID NO: 6350 - DNA, 19 bp, Homo sapiens
tggaattcaacttctgagg

SEQ ID NO: 6351 - DNA, 19 bp, Homo sapiens
ttggaattcaacttctgag

SEQ ID NO: 6352 - DNA, 19 bp, Homo sapiens
cttggaattcaacttctga

SEQ ID NO: 6353 - DNA, 19 bp, Homo sapiens
tcttggaattcaacttctg

SEQ ID NO: 6354 - DNA, 19 bp, Homo sapiens
ttcttggaattcaacttct

SEQ ID NO: 6355 - DNA, 19 bp, Homo sapiens
cttcttggaattcaacttc

SEQ ID NO: 6356 - DNA, 19 bp, Homo sapiens
tcttcttggaattcaactt

SEQ ID NO: 6357 - DNA, 19 bp, Homo sapiens
ttcttcttggaattcaact

SEQ ID NO: 6358 - DNA, 19 bp, Homo sapiens
tttcttcttggaattcaac

SEQ ID NO: 6359 - DNA, 19 bp, Homo sapiens
atttcttcttggaattcaa

SEQ ID NO: 6360 - DNA, 19 bp, Homo sapiens
catttcttcttggaattca

SEQ ID NO: 6361 - DNA, 19 bp, Homo sapiens
ccatttcttcttggaattc

SEQ ID NO: 6362 - DNA, 19 bp, Homo sapiens
gccatttcttcttggaatt

SEQ ID NO: 6363 - DNA, 19 bp, Homo sapiens
tgccatttcttcttggaat

SEQ ID NO: 6364 - DNA, 19 bp, Homo sapiens
ctgccatttcttcttggaa

SEQ ID NO: 6365 - DNA, 19 bp, Homo sapiens
gctgccatttcttcttgga

SEQ ID NO: 6366 - DNA, 19 bp, Homo sapiens
tgctgccatttcttcttgg

SEQ ID NO: 6367 - DNA, 19 bp, Homo sapiens
atgctgccatttcttcttg

SEQ ID NO: 6368 - DNA, 19 bp, Homo sapiens
gatgctgccatttcttctt

SEQ ID NO: 6369 - DNA, 19 bp, Homo sapiens
agatgctgccatttcttct

SEQ ID NO: 6370 - DNA, 19 bp, Homo sapiens
cagatgctgccatttcttc

SEQ ID NO: 6371 - DNA, 19 bp, Homo sapiens
tcagatgctgccatttctt

SEQ ID NO: 6372 - DNA, 19 bp, Homo sapiens
ttcagatgctgccatttct

SEQ ID NO: 6373 - DNA, 19 bp, Homo sapiens
gttcagatgctgccatttc

SEQ ID NO: 6374 - DNA, 19 bp, Homo sapiens
ggttcagatgctgccattt

SEQ ID NO: 6375 - DNA, 19 bp, Homo sapiens
gggttcagatgctgccatt

SEQ ID NO: 6376 - DNA, 19 bp, Homo sapiens
cgggttcagatgctgccat

SEQ ID NO: 6377 - DNA, 19 bp, Homo sapiens
acgggttcagatgctgcca

SEQ ID NO: 6378 - DNA, 19 bp, Homo sapiens
cacgggttcagatgctgcc

SEQ ID NO: 6379 - DNA, 19 bp, Homo sapiens
ccacgggttcagatgctgc

SEQ ID NO: 6380 - DNA, 19 bp, Homo sapiens
accacgggttcagatgctg

SEQ ID NO: 6381 - DNA, 19 bp, Homo sapiens
gaccacgggttcagatgct

SEQ ID NO: 6382 - DNA, 19 bp, Homo sapiens
ggaccacgggttcagatgc

SEQ ID NO: 6383 - DNA, 19 bp, Homo sapiens
tggaccacgggttcagatg

SEQ ID NO: 6384 - DNA, 19 bp, Homo sapiens
atggaccacgggttcagat

SEQ ID NO: 6385 - DNA, 19 bp, Homo sapiens
catggaccacgggttcaga

SEQ ID NO: 6386 - DNA, 19 bp, Homo sapiens
ccatggaccacgggttcag

SEQ ID NO: 6387 - DNA, 19 bp, Homo sapiens
cccatggaccacgggttca

SEQ ID NO: 6388 - DNA, 19 bp, Homo sapiens
ccccatggaccacgggttc

SEQ ID NO: 6389 - DNA, 19 bp, Homo sapiens
tccccatggaccacgggtt

SEQ ID NO: 6390 - DNA, 19 bp, Homo sapiens
atccccatggaccacgggt

SEQ ID NO: 6391 - DNA, 19 bp, Homo sapiens
tatccccatggaccacggg

SEQ ID NO: 6392 - DNA, 19 bp, Homo sapiens
atatccccatggaccacgg

SEQ ID NO: 6393 - DNA, 19 bp, Homo sapiens
aatatccccatggaccacg

SEQ ID NO: 6394 - DNA, 19 bp, Homo sapiens
taatatccccatggaccac

SEQ ID NO: 6395 - DNA, 19 bp, Homo sapiens
ataatatccccatggacca

SEQ ID NO: 6396 - DNA, 19 bp, Homo sapiens
aataatatccccatggacc

SEQ ID NO: 6397 - DNA, 19 bp, Homo sapiens
caataatatccccatggac

SEQ ID NO: 6398 - DNA, 19 bp, Homo sapiens
acaataatatccccatgga

SEQ ID NO: 6399 - DNA, 19 bp, Homo sapiens
cacaataatatccccatgg

SEQ ID NO: 6400 - DNA, 19 bp, Homo sapiens
tcacaataatatccccatg

SEQ ID NO: 6401 - DNA, 19 bp, Homo sapiens
gtcacaataatatccccat

SEQ ID NO: 6402 - DNA, 19 bp, Homo sapiens
agtcacaataatatcccca

SEQ ID NO: 6403 - DNA, 19 bp, Homo sapiens
cagtcacaataatatcccc

SEQ ID NO: 6404 - DNA, 19 bp, Homo sapiens
tcagtcacaataatatccc

SEQ ID NO: 6405 - DNA, 19 bp, Homo sapiens
ctcagtcacaataatatcc

SEQ ID NO: 6406 - DNA, 19 bp, Homo sapiens
tctcagtcacaataatatc

SEQ ID NO: 6407 - DNA, 19 bp, Homo sapiens
gtctcagtcacaataatat

SEQ ID NO: 6408 - DNA, 19 bp, Homo sapiens
agtctcagtcacaataata

SEQ ID NO: 6409 - DNA, 19 bp, Homo sapiens
aagtctcagtcacaataat

SEQ ID NO: 6410 - DNA, 19 bp, Homo sapiens
taagtctcagtcacaataa

SEQ ID NO: 6411 - DNA, 19 bp, Homo sapiens
gtaagtctcagtcacaata

SEQ ID NO: 6412 - DNA, 19 bp, Homo sapiens
cgtaagtctcagtcacaat

SEQ ID NO: 6413 - DNA, 19 bp, Homo sapiens
ccgtaagtctcagtcacaa

SEQ ID NO: 6414 - DNA, 19 bp, Homo sapiens
accgtaagtctcagtcaca

SEQ ID NO: 6415 - DNA, 19 bp, Homo sapiens
taccgtaagtctcagtcac

SEQ ID NO: 6416 - DNA, 19 bp, Homo sapiens
ttaccgtaagtctcagtca

SEQ ID NO: 6417 - DNA, 19 bp, Homo sapiens
attaccgtaagtctcagtc

SEQ ID NO: 6418 - DNA, 19 bp, Homo sapiens
cattaccgtaagtctcagt

SEQ ID NO: 6419 - DNA, 19 bp, Homo sapiens
gcattaccgtaagtctcag

SEQ ID NO: 6420 - DNA, 19 bp, Homo sapiens
agcattaccgtaagtctca

SEQ ID NO: 6421 - DNA, 19 bp, Homo sapiens
cagcattaccgtaagtctc

SEQ ID NO: 6422 - DNA, 19 bp, Homo sapiens
tcagcattaccgtaagtct

SEQ ID NO: 6423 - DNA, 19 bp, Homo sapiens
atcagcattaccgtaagtc

SEQ ID NO: 6424 - DNA, 19 bp, Homo sapiens
gatcagcattaccgtaagt

SEQ ID NO: 6425 - DNA, 19 bp, Homo sapiens
ggatcagcattaccgtaag

SEQ ID NO: 6426 - DNA, 19 bp, Homo sapiens
tggatcagcattaccgtaa

SEQ ID NO: 6427 - DNA, 19 bp, Homo sapiens
atggatcagcattaccgta

SEQ ID NO: 6428 - DNA, 19 bp, Homo sapiens
catggatcagcattaccgt

SEQ ID NO: 6429 - DNA, 19 bp, Homo sapiens
acatggatcagcattaccg

SEQ ID NO: 6430 - DNA, 19 bp, Homo sapiens
cacatggatcagcattacc

SEQ ID NO: 6431 - DNA, 19 bp, Homo sapiens
acacatggatcagcattac

SEQ ID NO: 6432 - DNA, 19 bp, Homo sapiens
cacacatggatcagcatta

SEQ ID NO: 6433 - DNA, 19 bp, Homo sapiens
gcacacatggatcagcatt

SEQ ID NO: 6434 - DNA, 19 bp, Homo sapiens
tgcacacatggatcagcat

SEQ ID NO: 6435 - DNA, 19 bp, Homo sapiens
ttgcacacatggatcagca

SEQ ID NO: 6436 - DNA, 19 bp, Homo sapiens
gttgcacacatggatcagc

SEQ ID NO: 6437 - DNA, 19 bp, Homo sapiens
ggttgcacacatggatcag

SEQ ID NO: 6438 - DNA, 19 bp, Homo sapiens
gggttgcacacatggatca

SEQ ID NO: 6439 - DNA, 19 bp, Homo sapiens
tgggttgcacacatggatc

SEQ ID NO: 6440 - DNA, 19 bp, Homo sapiens
gtgggttgcacacatggat

SEQ ID NO: 6441 - DNA, 19 bp, Homo sapiens
agtgggttgcacacatgga

SEQ ID NO: 6442 - DNA, 19 bp, Homo sapiens
tagtgggttgcacacatgg

SEQ ID NO: 6443 - DNA, 19 bp, Homo sapiens
gtagtgggttgcacacatg

SEQ ID NO: 6444 - DNA, 19 bp, Homo sapiens
tgtagtgggttgcacacat

SEQ ID NO: 6445 - DNA, 19 bp, Homo sapiens
ttgtagtgggttgcacaca

SEQ ID NO: 6446 - DNA, 19 bp, Homo sapiens
attgtagtgggttgcacac

SEQ ID NO: 6447 - DNA, 19 bp, Homo sapiens
aattgtagtgggttgcaca

SEQ ID NO: 6448 - DNA, 19 bp, Homo sapiens
taattgtagtgggttgcac

SEQ ID NO: 6449 - DNA, 19 bp, Homo sapiens
ataattgtagtgggttgca

SEQ ID NO: 6450 - DNA, 19 bp, Homo sapiens
aataattgtagtgggttgc

SEQ ID NO: 6451 - DNA, 19 bp, Homo sapiens
aaataattgtagtgggttg

SEQ ID NO: 6452 - DNA, 19 bp, Homo sapiens
aaaataattgtagtgggtt

SEQ ID NO: 6453 - DNA, 19 bp, Homo sapiens
aaaaataattgtagtgggt

SEQ ID NO: 6454 - DNA, 19 bp, Homo sapiens
caaaaataattgtagtggg

SEQ ID NO: 6455 - DNA, 19 bp, Homo sapiens
tcaaaaataattgtagtgg

SEQ ID NO: 6456 - DNA, 19 bp, Homo sapiens
atcaaaaataattgtagtg

SEQ ID NO: 6457 - DNA, 19 bp, Homo sapiens
gatcaaaaataattgtagt

SEQ ID NO: 6458 - DNA, 19 bp, Homo sapiens
ggatcaaaaataattgtag

SEQ ID NO: 6459 - DNA, 19 bp, Homo sapiens
aggatcaaaaataattgta

SEQ ID NO: 6460 - DNA, 19 bp, Homo sapiens
gaggatcaaaaataattgt

SEQ ID NO: 6461 - DNA, 19 bp, Homo sapiens
tgaggatcaaaaataattg

SEQ ID NO: 6462 - DNA, 19 bp, Homo sapiens
ctgaggatcaaaaataatt

SEQ ID NO: 6463 - DNA, 19 bp, Homo sapiens
gctgaggatcaaaaataat

SEQ ID NO: 6464 - DNA, 19 bp, Homo sapiens
agctgaggatcaaaaataa

SEQ ID NO: 6465 - DNA, 19 bp, Homo sapiens
aagctgaggatcaaaaata

SEQ ID NO: 6466 - DNA, 19 bp, Homo sapiens
caagctgaggatcaaaaat

SEQ ID NO: 6467 - DNA, 19 bp, Homo sapiens
gcaagctgaggatcaaaaa

SEQ ID NO: 6468 - DNA, 19 bp, Homo sapiens
tgcaagctgaggatcaaaa

SEQ ID NO: 6469 - DNA, 19 bp, Homo sapiens
gtgcaagctgaggatcaaa

SEQ ID NO: 6470 - DNA, 19 bp, Homo sapiens
ggtgcaagctgaggatcaa

SEQ ID NO: 6471 - DNA, 19 bp, Homo sapiens
gggtgcaagctgaggatca

SEQ ID NO: 6472 - DNA, 19 bp, Homo sapiens
tgggtgcaagctgaggatc

SEQ ID NO: 6473 - DNA, 19 bp, Homo sapiens
ttgggtgcaagctgaggat

SEQ ID NO: 6474 - DNA, 19 bp, Homo sapiens
attgggtgcaagctgagga

SEQ ID NO: 6475 - DNA, 19 bp, Homo sapiens
cattgggtgcaagctgagg

SEQ ID NO: 6476 - DNA, 19 bp, Homo sapiens
acattgggtgcaagctgag

SEQ ID NO: 6477 - DNA, 19 bp, Homo sapiens
aacattgggtgcaagctga

SEQ ID NO: 6478 - DNA, 19 bp, Homo sapiens
caacattgggtgcaagctg

SEQ ID NO: 6479 - DNA, 19 bp, Homo sapiens
acaacattgggtgcaagct

SEQ ID NO: 6480 - DNA, 19 bp, Homo sapiens
tacaacattgggtgcaagc

SEQ ID NO: 6481 - DNA, 19 bp, Homo sapiens
ctacaacattgggtgcaag

SEQ ID NO: 6482 - DNA, 19 bp, Homo sapiens
actacaacattgggtgcaa

SEQ ID NO: 6483 - DNA, 19 bp, Homo sapiens
tactacaacattgggtgca

SEQ ID NO: 6484 - DNA, 19 bp, Homo sapiens
ttactacaacattgggtgc

SEQ ID NO: 6485 - DNA, 19 bp, Homo sapiens
gttactacaacattgggtg

SEQ ID NO: 6486 - DNA, 19 bp, Homo sapiens
ggttactacaacattgggt

SEQ ID NO: 6487 - DNA, 19 bp, Homo sapiens
cggttactacaacattggg

SEQ ID NO: 6488 - DNA, 19 bp, Homo sapiens
tcggttactacaacattgg

SEQ ID NO: 6489 - DNA, 19 bp, Homo sapiens
ttcggttactacaacattg

SEQ ID NO: 6490 - DNA, 19 bp, Homo sapiens
cttcggttactacaacatt

SEQ ID NO: 6491 - DNA, 19 bp, Homo sapiens
gcttcggttactacaacat

SEQ ID NO: 6492 - DNA, 19 bp, Homo sapiens
tgcttcggttactacaaca

SEQ ID NO: 6493 - DNA, 19 bp, Homo sapiens
ctgcttcggttactacaac

SEQ ID NO: 6494 - DNA, 19 bp, Homo sapiens
actgcttcggttactacaa

SEQ ID NO: 6495 - DNA, 19 bp, Homo sapiens
tactgcttcggttactaca

SEQ ID NO: 6496 - DNA, 19 bp, Homo sapiens
ttactgcttcggttactac

SEQ ID NO: 6497 - DNA, 19 bp, Homo sapiens
attactgcttcggttacta

SEQ ID NO: 6498 - DNA, 19 bp, Homo sapiens
cattactgcttcggttact

SEQ ID NO: 6499 - DNA, 19 bp, Homo sapiens
ccattactgcttcggttac

SEQ ID NO: 6500 - DNA, 19 bp, Homo sapiens
gccattactgcttcggtta

SEQ ID NO: 6501 - DNA, 19 bp, Homo sapiens
tgccattactgcttcggtt

SEQ ID NO: 6502 - DNA, 19 bp, Homo sapiens
gtgccattactgcttcggt

SEQ ID NO: 6503 - DNA, 19 bp, Homo sapiens
ggtgccattactgcttcgg

SEQ ID NO: 6504 - DNA, 19 bp, Homo sapiens
aggtgccattactgcttcg

SEQ ID NO: 6505 - DNA, 19 bp, Homo sapiens
caggtgccattactgcttc

SEQ ID NO: 6506 - DNA, 19 bp, Homo sapiens
acaggtgccattactgctt

SEQ ID NO: 6507 - DNA, 19 bp, Homo sapiens
gacaggtgccattactgct

SEQ ID NO: 6508 - DNA, 19 bp, Homo sapiens
agacaggtgccattactgc

SEQ ID NO: 6509 - DNA, 19 bp, Homo sapiens
tagacaggtgccattactg

SEQ ID NO: 6510 - DNA, 19 bp, Homo sapiens
atagacaggtgccattact

SEQ ID NO: 6511 - DNA, 19 bp, Homo sapiens
catagacaggtgccattac

SEQ ID NO: 6512 - DNA, 19 bp, Homo sapiens
tcatagacaggtgccatta

SEQ ID NO: 6513 - DNA, 19 bp, Homo sapiens
atcatagacaggtgccatt

SEQ ID NO: 6514 - DNA, 19 bp, Homo sapiens
tatcatagacaggtgccat

SEQ ID NO: 6515 - DNA, 19 bp, Homo sapiens
atatcatagacaggtgcca

SEQ ID NO: 6516 - DNA, 19 bp, Homo sapiens
aatatcatagacaggtgcc

SEQ ID NO: 6517 - DNA, 19 bp, Homo sapiens
gaatatcatagacaggtgc

SEQ ID NO: 6518 - DNA, 19 bp, Homo sapiens
tgaatatcatagacaggtg

SEQ ID NO: 6519 - DNA, 19 bp, Homo sapiens
ttgaatatcatagacaggt

SEQ ID NO: 6520 - DNA, 19 bp, Homo sapiens
cttgaatatcatagacagg

SEQ ID NO: 6521 - DNA, 19 bp, Homo sapiens
ccttgaatatcatagacag

SEQ ID NO: 6522 - DNA, 19 bp, Homo sapiens
cccttgaatatcatagaca

SEQ ID NO: 6523 - DNA, 19 bp, Homo sapiens
tcccttgaatatcatagac

SEQ ID NO: 6524 - DNA, 19 bp, Homo sapiens
ttcccttgaatatcataga

SEQ ID NO: 6525 - DNA, 19 bp, Homo sapiens
attcccttgaatatcatag

SEQ ID NO: 6526 - DNA, 19 bp, Homo sapiens
tattcccttgaatatcata

SEQ ID NO: 6527 - DNA, 19 bp, Homo sapiens
atattcccttgaatatcat

SEQ ID NO: 6528 - DNA, 19 bp, Homo sapiens
aatattcccttgaatatca

SEQ ID NO: 6529 - DNA, 19 bp, Homo sapiens
aaatattcccttgaatatc

SEQ ID NO: 6530 - DNA, 19 bp, Homo sapiens
caaatattcccttgaatat

SEQ ID NO: 6531 - DNA, 19 bp, Homo sapiens
acaaatattcccttgaata

SEQ ID NO: 6532 - DNA, 19 bp, Homo sapiens
cacaaatattcccttgaat

SEQ ID NO: 6533 - DNA, 19 bp, Homo sapiens
acacaaatattcccttgaa

SEQ ID NO: 6534 - DNA, 19 bp, Homo sapiens
tacacaaatattcccttga

SEQ ID NO: 6535 - DNA, 19 bp, Homo sapiens
gtacacaaatattcccttg

SEQ ID NO: 6536 - DNA, 19 bp, Homo sapiens
ggtacacaaatattccctt

SEQ ID NO: 6537 - DNA, 19 bp, Homo sapiens
aggtacacaaatattccct

SEQ ID NO: 6538 - DNA, 19 bp, Homo sapiens
caggtacacaaatattccc

SEQ ID NO: 6539 - DNA, 19 bp, Homo sapiens
gcaggtacacaaatattcc

SEQ ID NO: 6540 - DNA, 19 bp, Homo sapiens
agcaggtacacaaatattc

SEQ ID NO: 6541 - DNA, 19 bp, Homo sapiens
cagcaggtacacaaatatt

SEQ ID NO: 6542 - DNA, 19 bp, Homo sapiens
tcagcaggtacacaaatat

SEQ ID NO: 6543 - DNA, 19 bp, Homo sapiens
ctcagcaggtacacaaata

SEQ ID NO: 6544 - DNA, 19 bp, Homo sapiens
actcagcaggtacacaaat

SEQ ID NO: 6545 - DNA, 19 bp, Homo sapiens
aactcagcaggtacacaaa

SEQ ID NO: 6546 - DNA, 19 bp, Homo sapiens
taactcagcaggtacacaa

SEQ ID NO: 6547 - DNA, 19 bp, Homo sapiens
ctaactcagcaggtacaca

SEQ ID NO: 6548 - DNA, 19 bp, Homo sapiens
gctaactcagcaggtacac

SEQ ID NO: 6549 - DNA, 19 bp, Homo sapiens
tgctaactcagcaggtaca

SEQ ID NO: 6550 - DNA, 19 bp, Homo sapiens
ctgctaactcagcaggtac

SEQ ID NO: 6551 - DNA, 19 bp, Homo sapiens
tctgctaactcagcaggta

SEQ ID NO: 6552 - DNA, 19 bp, Homo sapiens
atctgctaactcagcaggt

SEQ ID NO: 6553 - DNA, 19 bp, Homo sapiens
aatctgctaactcagcagg

SEQ ID NO: 6554 - DNA, 19 bp, Homo sapiens
taatctgctaactcagcag

SEQ ID NO: 6555 - DNA, 19 bp, Homo sapiens
gtaatctgctaactcagca

SEQ ID NO: 6556 - DNA, 19 bp, Homo sapiens
tgtaatctgctaactcagc

SEQ ID NO: 6557 - DNA, 19 bp, Homo sapiens
ttgtaatctgctaactcag

SEQ ID NO: 6558 - DNA, 19 bp, Homo sapiens
gttgtaatctgctaactca

SEQ ID NO: 6559 - DNA, 19 bp, Homo sapiens
tgttgtaatctgctaactc

SEQ ID NO: 6560 - DNA, 19 bp, Homo sapiens
ttgttgtaatctgctaact

SEQ ID NO: 6561 - DNA, 19 bp, Homo sapiens
attgttgtaatctgctaac

SEQ ID NO: 6562 - DNA, 19 bp, Homo sapiens
cattgttgtaatctgctaa

SEQ ID NO: 6563 - DNA, 19 bp, Homo sapiens
acattgttgtaatctgcta

SEQ ID NO: 6564 - DNA, 19 bp, Homo sapiens
tacattgttgtaatctgct

SEQ ID NO: 6565 - DNA, 19 bp, Homo sapiens
ttacattgttgtaatctgc

SEQ ID NO: 6566 - DNA, 19 bp, Homo sapiens
attacattgttgtaatctg

SEQ ID NO: 6567 - DNA, 19 bp, Homo sapiens
gattacattgttgtaatct

SEQ ID NO: 6568 - DNA, 19 bp, Homo sapiens
agattacattgttgtaatc

SEQ ID NO: 6569 - DNA, 19 bp, Homo sapiens
tagattacattgttgtaat

SEQ ID NO: 6570 - DNA, 19 bp, Homo sapiens
atagattacattgttgtaa

SEQ ID NO: 6571 - DNA, 19 bp, Homo sapiens
catagattacattgttgta

SEQ ID NO: 6572 - DNA, 19 bp, Homo sapiens
gcatagattacattgttgt

SEQ ID NO: 6573 - DNA, 19 bp, Homo sapiens
agcatagattacattgttg

SEQ ID NO: 6574 - DNA, 19 bp, Homo sapiens
cagcatagattacattgtt

SEQ ID NO: 6575 - DNA, 19 bp, Homo sapiens
tcagcatagattacattgt

SEQ ID NO: 6576 - DNA, 19 bp, Homo sapiens
ctcagcatagattacattg

SEQ ID NO: 6577 - DNA, 19 bp, Homo sapiens
tctcagcatagattacatt

SEQ ID NO: 6578 - DNA, 19 bp, Homo sapiens
ctctcagcatagattacat

SEQ ID NO: 6579 - DNA, 19 bp, Homo sapiens
tctctcagcatagattaca

SEQ ID NO: 6580 - DNA, 19 bp, Homo sapiens
ctctctcagcatagattac

SEQ ID NO: 6581 - DNA, 19 bp, Homo sapiens
actctctcagcatagatta

SEQ ID NO: 6582 - DNA, 19 bp, Homo sapiens
tactctctcagcatagatt

SEQ ID NO: 6583 - DNA, 19 bp, Homo sapiens
gtactctctcagcatagat

SEQ ID NO: 6584 - DNA, 19 bp, Homo sapiens
agtactctctcagcataga

SEQ ID NO: 6585 - DNA, 19 bp, Homo sapiens
cagtactctctcagcatag

SEQ ID NO: 6586 - DNA, 19 bp, Homo sapiens
ccagtactctctcagcata

SEQ ID NO: 6587 - DNA, 19 bp, Homo sapiens
gccagtactctctcagcat

SEQ ID NO: 6588 - DNA, 19 bp, Homo sapiens
agccagtactctctcagca

SEQ ID NO: 6589 - DNA, 19 bp, Homo sapiens
tagccagtactctctcagc

SEQ ID NO: 6590 - DNA, 19 bp, Homo sapiens
ctagccagtactctctcag

SEQ ID NO: 6591 - DNA, 19 bp, Homo sapiens
actagccagtactctctca

SEQ ID NO: 6592 - DNA, 19 bp, Homo sapiens
gactagccagtactctctc

SEQ ID NO: 6593 - DNA, 19 bp, Homo sapiens
ggactagccagtactctct

SEQ ID NO: 6594 - DNA, 19 bp, Homo sapiens
aggactagccagtactctc

SEQ ID NO: 6595 - DNA, 19 bp, Homo sapiens
caggactagccagtactct

SEQ ID NO: 6596 - DNA, 19 bp, Homo sapiens
ccaggactagccagtactc

SEQ ID NO: 6597 - DNA, 19 bp, Homo sapiens
accaggactagccagtact

SEQ ID NO: 6598 - DNA, 19 bp, Homo sapiens
caccaggactagccagtac

SEQ ID NO: 6599 - DNA, 19 bp, Homo sapiens
acaccaggactagccagta

SEQ ID NO: 6600 - DNA, 19 bp, Homo sapiens
cacaccaggactagccagt

SEQ ID NO: 6601 - DNA, 19 bp, Homo sapiens
gcacaccaggactagccag

SEQ ID NO: 6602 - DNA, 19 bp, Homo sapiens
ggcacaccaggactagcca

SEQ ID NO: 6603 - DNA, 19 bp, Homo sapiens
aggcacaccaggactagcc

SEQ ID NO: 6604 - DNA, 19 bp, Homo sapiens
caggcacaccaggactagc

SEQ ID NO: 6605 - DNA, 19 bp, Homo sapiens
tcaggcacaccaggactag

SEQ ID NO: 6606 - DNA, 19 bp, Homo sapiens
gtcaggcacaccaggacta

SEQ ID NO: 6607 - DNA, 19 bp, Homo sapiens
tgtcaggcacaccaggact

SEQ ID NO: 6608 - DNA, 19 bp, Homo sapiens
atgtcaggcacaccaggac

SEQ ID NO: 6609 - DNA, 19 bp, Homo sapiens
catgtcaggcacaccagga

SEQ ID NO: 6610 - DNA, 19 bp, Homo sapiens
tcatgtcaggcacaccagg

SEQ ID NO: 6611 - DNA, 19 bp, Homo sapiens
ctcatgtcaggcacaccag

SEQ ID NO: 6612 - DNA, 19 bp, Homo sapiens
gctcatgtcaggcacacca

SEQ ID NO: 6613 - DNA, 19 bp, Homo sapiens
tgctcatgtcaggcacacc

SEQ ID NO: 6614 - DNA, 19 bp, Homo sapiens
ttgctcatgtcaggcacac

SEQ ID NO: 6615 - DNA, 19 bp, Homo sapiens
attgctcatgtcaggcaca

SEQ ID NO: 6616 - DNA, 19 bp, Homo sapiens
tattgctcatgtcaggcac

SEQ ID NO: 6617 - DNA, 19 bp, Homo sapiens
ctattgctcatgtcaggca

SEQ ID NO: 6618 - DNA, 19 bp, Homo sapiens
actattgctcatgtcaggc

SEQ ID NO: 6619 - DNA, 19 bp, Homo sapiens
tactattgctcatgtcagg

SEQ ID NO: 6620 - DNA, 19 bp, Homo sapiens
ctactattgctcatgtcag

SEQ ID NO: 6621 - DNA, 19 bp, Homo sapiens
gctactattgctcatgtca

SEQ ID NO: 6622 - DNA, 19 bp, Homo sapiens
tgctactattgctcatgtc

SEQ ID NO: 6623 - DNA, 19 bp, Homo sapiens
gtgctactattgctcatgt

SEQ ID NO: 6624 - DNA, 19 bp, Homo sapiens
cgtgctactattgctcatg

SEQ ID NO: 6625 - DNA, 19 bp, Homo sapiens
tcgtgctactattgctcat

SEQ ID NO: 6626 - DNA, 19 bp, Homo sapiens
gtcgtgctactattgctca

SEQ ID NO: 6627 - DNA, 19 bp, Homo sapiens
agtcgtgctactattgctc

SEQ ID NO: 6628 - DNA, 19 bp, Homo sapiens
cagtcgtgctactattgct

SEQ ID NO: 6629 - DNA, 19 bp, Homo sapiens
tcagtcgtgctactattgc

SEQ ID NO: 6630 - DNA, 19 bp, Homo sapiens
ctcagtcgtgctactattg

SEQ ID NO: 6631 - DNA, 19 bp, Homo sapiens
cctcagtcgtgctactatt

SEQ ID NO: 6632 - DNA, 19 bp, Homo sapiens
ccctcagtcgtgctactat

SEQ ID NO: 6633 - DNA, 19 bp, Homo sapiens
accctcagtcgtgctacta

SEQ ID NO: 6634 - DNA, 19 bp, Homo sapiens
aaccctcagtcgtgctact

SEQ ID NO: 6635 - DNA, 19 bp, Homo sapiens
caaccctcagtcgtgctac

SEQ ID NO: 6636 - DNA, 19 bp, Homo sapiens
acaaccctcagtcgtgcta

SEQ ID NO: 6637 - DNA, 19 bp, Homo sapiens
tacaaccctcagtcgtgct

SEQ ID NO: 6638 - DNA, 19 bp, Homo sapiens
atacaaccctcagtcgtgc

SEQ ID NO: 6639 - DNA, 19 bp, Homo sapiens
catacaaccctcagtcgtg

SEQ ID NO: 6640 - DNA, 19 bp, Homo sapiens
ccatacaaccctcagtcgt

SEQ ID NO: 6641 - DNA, 19 bp, Homo sapiens
cccatacaaccctcagtcg

SEQ ID NO: 6642 - DNA, 19 bp, Homo sapiens
tcccatacaaccctcagtc

SEQ ID NO: 6643 - DNA, 19 bp, Homo sapiens
gtcccatacaaccctcagt

SEQ ID NO: 6644 - DNA, 19 bp, Homo sapiens
ggtcccatacaaccctcag

SEQ ID NO: 6645 - DNA, 19 bp, Homo sapiens
aggtcccatacaaccctca

SEQ ID NO: 6646 - DNA, 19 bp, Homo sapiens
caggtcccatacaaccctc

SEQ ID NO: 6647 - DNA, 19 bp, Homo sapiens
acaggtcccatacaaccct

SEQ ID NO: 6648 - DNA, 19 bp, Homo sapiens
cacaggtcccatacaaccc

SEQ ID NO: 6649 - DNA, 19 bp, Homo sapiens
tcacaggtcccatacaacc

SEQ ID NO: 6650 - DNA, 19 bp, Homo sapiens
atcacaggtcccatacaac

SEQ ID NO: 6651 - DNA, 19 bp, Homo sapiens
catcacaggtcccatacaa

SEQ ID NO: 6652 - DNA, 19 bp, Homo sapiens
tcatcacaggtcccataca

SEQ ID NO: 6653 - DNA, 19 bp, Homo sapiens
ctcatcacaggtcccatac

SEQ ID NO: 6654 - DNA, 19 bp, Homo sapiens
gctcatcacaggtcccata

SEQ ID NO: 6655 - DNA, 19 bp, Homo sapiens
cgctcatcacaggtcccat

SEQ ID NO: 6656 - DNA, 19 bp, Homo sapiens
ccgctcatcacaggtccca

SEQ ID NO: 6657 - DNA, 19 bp, Homo sapiens
gccgctcatcacaggtccc

SEQ ID NO: 6658 - DNA, 19 bp, Homo sapiens
tgccgctcatcacaggtcc

SEQ ID NO: 6659 - DNA, 19 bp, Homo sapiens
ttgccgctcatcacaggtc

SEQ ID NO: 6660 - DNA, 19 bp, Homo sapiens
attgccgctcatcacaggt

SEQ ID NO: 6661 - DNA, 19 bp, Homo sapiens
tattgccgctcatcacagg

SEQ ID NO: 6662 - DNA, 19 bp, Homo sapiens
atattgccgctcatcacag

SEQ ID NO: 6663 - DNA, 19 bp, Homo sapiens
aatattgccgctcatcaca

SEQ ID NO: 6664 - DNA, 19 bp, Homo sapiens
aaatattgccgctcatcac

SEQ ID NO: 6665 - DNA, 19 bp, Homo sapiens
aaaatattgccgctcatca

SEQ ID NO: 6666 - DNA, 19 bp, Homo sapiens
taaaatattgccgctcatc

SEQ ID NO: 6667 - DNA, 19 bp, Homo sapiens
ctaaaatattgccgctcat

SEQ ID NO: 6668 - DNA, 19 bp, Homo sapiens
actaaaatattgccgctca

SEQ ID NO: 6669 - DNA, 19 bp, Homo sapiens
tactaaaatattgccgctc

SEQ ID NO: 6670 - DNA, 19 bp, Homo sapiens
ctactaaaatattgccgct

SEQ ID NO: 6671 - DNA, 19 bp, Homo sapiens
cctactaaaatattgccgc

SEQ ID NO: 6672 - DNA, 19 bp, Homo sapiens
ccctactaaaatattgccg

SEQ ID NO: 6673 - DNA, 19 bp, Homo sapiens
gccctactaaaatattgcc

SEQ ID NO: 6674 - DNA, 19 bp, Homo sapiens
ggccctactaaaatattgc

SEQ ID NO: 6675 - DNA, 19 bp, Homo sapiens
tggccctactaaaatattg

SEQ ID NO: 6676 - DNA, 19 bp, Homo sapiens
ctggccctactaaaatatt

SEQ ID NO: 6677 - DNA, 19 bp, Homo sapiens
tctggccctactaaaatat

SEQ ID NO: 6678 - DNA, 19 bp, Homo sapiens
ttctggccctactaaaata

SEQ ID NO: 6679 - DNA, 19 bp, Homo sapiens
tttctggccctactaaaat

SEQ ID NO: 6680 - DNA, 19 bp, Homo sapiens
atttctggccctactaaaa

SEQ ID NO: 6681 - DNA, 19 bp, Homo sapiens
aatttctggccctactaaa

SEQ ID NO: 6682 - DNA, 19 bp, Homo sapiens
gaatttctggccctactaa

SEQ ID NO: 6683 - DNA, 19 bp, Homo sapiens
tgaatttctggccctacta

SEQ ID NO: 6684 - DNA, 19 bp, Homo sapiens
ttgaatttctggccctact

SEQ ID NO: 6685 - DNA, 19 bp, Homo sapiens
cttgaatttctggccctac

SEQ ID NO: 6686 - DNA, 19 bp, Homo sapiens
acttgaatttctggcccta

SEQ ID NO: 6687 - DNA, 19 bp, Homo sapiens
cacttgaatttctggccct

SEQ ID NO: 6688 - DNA, 19 bp, Homo sapiens
tcacttgaatttctggccc

SEQ ID NO: 6689 - DNA, 19 bp, Homo sapiens
atcacttgaatttctggcc

SEQ ID NO: 6690 - DNA, 19 bp, Homo sapiens
catcacttgaatttctggc

SEQ ID NO: 6691 - DNA, 19 bp, Homo sapiens
gcatcacttgaatttctgg

SEQ ID NO: 6692 - DNA, 19 bp, Homo sapiens
tgcatcacttgaatttctg

SEQ ID NO: 6693 - DNA, 19 bp, Homo sapiens
ttgcatcacttgaatttct

SEQ ID NO: 6694 - DNA, 19 bp, Homo sapiens
tttgcatcacttgaatttc

SEQ ID NO: 6695 - DNA, 19 bp, Homo sapiens
atttgcatcacttgaattt

SEQ ID NO: 6696 - DNA, 19 bp, Homo sapiens
catttgcatcacttgaatt

SEQ ID NO: 6697 - DNA, 19 bp, Homo sapiens
tcatttgcatcacttgaat

SEQ ID NO: 6698 - DNA, 19 bp, Homo sapiens
atcatttgcatcacttgaa

SEQ ID NO: 6699 - DNA, 19 bp, Homo sapiens
catcatttgcatcacttga

SEQ ID NO: 6700 - DNA, 19 bp, Homo sapiens
tcatcatttgcatcacttg

SEQ ID NO: 6701 - DNA, 19 bp, Homo sapiens
ctcatcatttgcatcactt

SEQ ID NO: 6702 - DNA, 19 bp, Homo sapiens
actcatcatttgcatcact

SEQ ID NO: 6703 - DNA, 19 bp, Homo sapiens
gactcatcatttgcatcac

SEQ ID NO: 6704 - DNA, 19 bp, Homo sapiens
ggactcatcatttgcatca

SEQ ID NO: 6705 - DNA, 19 bp, Homo sapiens
tggactcatcatttgcatc

SEQ ID NO: 6706 - DNA, 19 bp, Homo sapiens
ctggactcatcatttgcat

SEQ ID NO: 6707 - DNA, 19 bp, Homo sapiens
tctggactcatcatttgca

SEQ ID NO: 6708 - DNA, 19 bp, Homo sapiens
gtctggactcatcatttgc

SEQ ID NO: 6709 - DNA, 19 bp, Homo sapiens
ggtctggactcatcatttg

SEQ ID NO: 6710 - DNA, 19 bp, Homo sapiens
aggtctggactcatcattt

SEQ ID NO: 6711 - DNA, 19 bp, Homo sapiens
aaggtctggactcatcatt

SEQ ID NO: 6712 - DNA, 19 bp, Homo sapiens
gaaggtctggactcatcat

SEQ ID NO: 6713 - DNA, 19 bp, Homo sapiens
ggaaggtctggactcatca

SEQ ID NO: 6714 - DNA, 19 bp, Homo sapiens
gggaaggtctggactcatc

SEQ ID NO: 6715 - DNA, 19 bp, Homo sapiens
tgggaaggtctggactcat

SEQ ID NO: 6716 - DNA, 19 bp, Homo sapiens
atgggaaggtctggactca

SEQ ID NO: 6717 - DNA, 19 bp, Homo sapiens
tatgggaaggtctggactc

SEQ ID NO: 6718 - DNA, 19 bp, Homo sapiens
ctatgggaaggtctggact

SEQ ID NO: 6719 - DNA, 19 bp, Homo sapiens
cctatgggaaggtctggac

SEQ ID NO: 6720 - DNA, 19 bp, Homo sapiens
gcctatgggaaggtctgga

SEQ ID NO: 6721 - DNA, 19 bp, Homo sapiens
ggcctatgggaaggtctgg

SEQ ID NO: 6722 - DNA, 19 bp, Homo sapiens
tggcctatgggaaggtctg

SEQ ID NO: 6723 - DNA, 19 bp, Homo sapiens
ttggcctatgggaaggtct

SEQ ID NO: 6724 - DNA, 19 bp, Homo sapiens
tttggcctatgggaaggtc

SEQ ID NO: 6725 - DNA, 19 bp, Homo sapiens
gtttggcctatgggaaggt

SEQ ID NO: 6726 - DNA, 19 bp, Homo sapiens
ggtttggcctatgggaagg

SEQ ID NO: 6727 - DNA, 19 bp, Homo sapiens
cggtttggcctatgggaag

SEQ ID NO: 6728 - DNA, 19 bp, Homo sapiens
acggtttggcctatgggaa

SEQ ID NO: 6729 - DNA, 19 bp, Homo sapiens
aacggtttggcctatggga

SEQ ID NO: 6730 - DNA, 19 bp, Homo sapiens
caacggtttggcctatggg

SEQ ID NO: 6731 - DNA, 19 bp, Homo sapiens
ccaacggtttggcctatgg

SEQ ID NO: 6732 - DNA, 19 bp, Homo sapiens
gccaacggtttggcctatg

SEQ ID NO: 6733 - DNA, 19 bp, Homo sapiens
agccaacggtttggcctat

SEQ ID NO: 6734 - DNA, 19 bp, Homo sapiens
gagccaacggtttggccta

SEQ ID NO: 6735 - DNA, 19 bp, Homo sapiens
ggagccaacggtttggcct

SEQ ID NO: 6736 - DNA, 19 bp, Homo sapiens
tggagccaacggtttggcc

SEQ ID NO: 6737 - DNA, 19 bp, Homo sapiens
gtggagccaacggtttggc

SEQ ID NO: 6738 - DNA, 19 bp, Homo sapiens
tgtggagccaacggtttgg

SEQ ID NO: 6739 - DNA, 19 bp, Homo sapiens
atgtggagccaacggtttg

SEQ ID NO: 6740 - DNA, 19 bp, Homo sapiens
gatgtggagccaacggttt

SEQ ID NO: 6741 - DNA, 19 bp, Homo sapiens
ggatgtggagccaacggtt

SEQ ID NO: 6742 - DNA, 19 bp, Homo sapiens
gggatgtggagccaacggt

SEQ ID NO: 6743 - DNA, 19 bp, Homo sapiens
ggggatgtggagccaacgg

SEQ ID NO: 6744 - DNA, 19 bp, Homo sapiens
gggggatgtggagccaacg

SEQ ID NO: 6745 - DNA, 19 bp, Homo sapiens
tgggggatgtggagccaac

SEQ ID NO: 6746 - DNA, 19 bp, Homo sapiens
atgggggatgtggagccaa

SEQ ID NO: 6747 - DNA, 19 bp, Homo sapiens
catgggggatgtggagcca

SEQ ID NO: 6748 - DNA, 19 bp, Homo sapiens
tcatgggggatgtggagcc

SEQ ID NO: 6749 - DNA, 19 bp, Homo sapiens
gtcatgggggatgtggagc

SEQ ID NO: 6750 - DNA, 19 bp, Homo sapiens
tgtcatgggggatgtggag

SEQ ID NO: 6751 - DNA, 19 bp, Homo sapiens
atgtcatgggggatgtgga

SEQ ID NO: 6752 - DNA, 19 bp, Homo sapiens
gatgtcatgggggatgtgg

SEQ ID NO: 6753 - DNA, 19 bp, Homo sapiens
agatgtcatgggggatgtg

SEQ ID NO: 6754 - DNA, 19 bp, Homo sapiens
gagatgtcatgggggatgt

SEQ ID NO: 6755 - DNA, 19 bp, Homo sapiens
cgagatgtcatgggggatg

SEQ ID NO: 6756 - DNA, 19 bp, Homo sapiens
tcgagatgtcatgggggat

SEQ ID NO: 6757 - DNA, 19 bp, Homo sapiens
gtcgagatgtcatggggga

SEQ ID NO: 6758 - DNA, 19 bp, Homo sapiens
tgtcgagatgtcatggggg

SEQ ID NO: 6759 - DNA, 19 bp, Homo sapiens
gtgtcgagatgtcatgggg

SEQ ID NO: 6760 - DNA, 19 bp, Homo sapiens
tgtgtcgagatgtcatggg

SEQ ID NO: 6761 - DNA, 19 bp, Homo sapiens
ctgtgtcgagatgtcatgg

SEQ ID NO: 6762 - DNA, 19 bp, Homo sapiens
tctgtgtcgagatgtcatg

SEQ ID NO: 6763 - DNA, 19 bp, Homo sapiens
ctctgtgtcgagatgtcat

SEQ ID NO: 6764 - DNA, 19 bp, Homo sapiens
actctgtgtcgagatgtca

SEQ ID NO: 6765 - DNA, 19 bp, Homo sapiens
tactctgtgtcgagatgtc

SEQ ID NO: 6766 - DNA, 19 bp, Homo sapiens
ttactctgtgtcgagatgt

SEQ ID NO: 6767 - DNA, 19 bp, Homo sapiens
gttactctgtgtcgagatg

SEQ ID NO: 6768 - DNA, 19 bp, Homo sapiens
tgttactctgtgtcgagat

SEQ ID NO: 6769 - DNA, 19 bp, Homo sapiens
gtgttactctgtgtcgaga

SEQ ID NO: 6770 - DNA, 19 bp, Homo sapiens
cgtgttactctgtgtcgag

SEQ ID NO: 6771 - DNA, 19 bp, Homo sapiens
tcgtgttactctgtgtcga

SEQ ID NO: 6772 - DNA, 19 bp, Homo sapiens
atcgtgttactctgtgtcg

SEQ ID NO: 6773 - DNA, 19 bp, Homo sapiens
tatcgtgttactctgtgtc

SEQ ID NO: 6774 - DNA, 19 bp, Homo sapiens
gtatcgtgttactctgtgt

SEQ ID NO: 6775 - DNA, 19 bp, Homo sapiens
tgtatcgtgttactctgtg

SEQ ID NO: 6776 - DNA, 19 bp, Homo sapiens
ctgtatcgtgttactctgt

SEQ ID NO: 6777 - DNA, 19 bp, Homo sapiens
actgtatcgtgttactctg

SEQ ID NO: 6778 - DNA, 19 bp, Homo sapiens
tactgtatcgtgttactct

SEQ ID NO: 6779 - DNA, 19 bp, Homo sapiens
ttactgtatcgtgttactc

SEQ ID NO: 6780 - DNA, 19 bp, Homo sapiens
gttactgtatcgtgttact

SEQ ID NO: 6781 - DNA, 19 bp, Homo sapiens
tgttactgtatcgtgttac

SEQ ID NO: 6782 - DNA, 19 bp, Homo sapiens
atgttactgtatcgtgtta

SEQ ID NO: 6783 - DNA, 19 bp, Homo sapiens
tatgttactgtatcgtgtt

SEQ ID NO: 6784 - DNA, 19 bp, Homo sapiens
gtatgttactgtatcgtgt

SEQ ID NO: 6785 - DNA, 19 bp, Homo sapiens
tgtatgttactgtatcgtg

SEQ ID NO: 6786 - DNA, 19 bp, Homo sapiens
atgtatgttactgtatcgt

SEQ ID NO: 6787 - DNA, 19 bp, Homo sapiens
aatgtatgttactgtatcg

SEQ ID NO: 6788 - DNA, 19 bp, Homo sapiens
taatgtatgttactgtatc

SEQ ID NO: 6789 - DNA, 19 bp, Homo sapiens
gtaatgtatgttactgtat

SEQ ID NO: 6790 - DNA, 19 bp, Homo sapiens
tgtaatgtatgttactgta

SEQ ID NO: 6791 - DNA, 19 bp, Homo sapiens
gtgtaatgtatgttactgt

SEQ ID NO: 6792 - DNA, 19 bp, Homo sapiens
ggtgtaatgtatgttactg

SEQ ID NO: 6793 - DNA, 19 bp, Homo sapiens
gggtgtaatgtatgttact

SEQ ID NO: 6794 - DNA, 19 bp, Homo sapiens
tgggtgtaatgtatgttac

SEQ ID NO: 6795 - DNA, 19 bp, Homo sapiens
ttgggtgtaatgtatgtta

SEQ ID NO: 6796 - DNA, 19 bp, Homo sapiens
gttgggtgtaatgtatgtt

SEQ ID NO: 6797 - DNA, 19 bp, Homo sapiens
tgttgggtgtaatgtatgt

SEQ ID NO: 6798 - DNA, 19 bp, Homo sapiens
ctgttgggtgtaatgtatg

SEQ ID NO: 6799 - DNA, 19 bp, Homo sapiens
actgttgggtgtaatgtat

SEQ ID NO: 6800 - DNA, 19 bp, Homo sapiens
tactgttgggtgtaatgta

SEQ ID NO: 6801 - DNA, 19 bp, Homo sapiens
ttactgttgggtgtaatgt

SEQ ID NO: 6802 - DNA, 19 bp, Homo sapiens
cttactgttgggtgtaatg

SEQ ID NO: 6803 - DNA, 19 bp, Homo sapiens
acttactgttgggtgtaat

SEQ ID NO: 6804 - DNA, 19 bp, Homo sapiens
cacttactgttgggtgtaa

SEQ ID NO: 6805 - DNA, 19 bp, Homo sapiens
gcacttactgttgggtgta

SEQ ID NO: 6806 - DNA, 19 bp, Homo sapiens
agcacttactgttgggtgt

SEQ ID NO: 6807 - DNA, 19 bp, Homo sapiens
aagcacttactgttgggtg

SEQ ID NO: 6808 - DNA, 19 bp, Homo sapiens
aaagcacttactgttgggt

SEQ ID NO: 6809 - DNA, 19 bp, Homo sapiens
taaagcacttactgttggg

SEQ ID NO: 6810 - DNA, 19 bp, Homo sapiens
ataaagcacttactgttgg

SEQ ID NO: 6811 - DNA, 19 bp, Homo sapiens
cataaagcacttactgttg

SEQ ID NO: 6812 - DNA, 19 bp, Homo sapiens
ccataaagcacttactgtt

SEQ ID NO: 6813 - DNA, 19 bp, Homo sapiens
accataaagcacttactgt

SEQ ID NO: 6814 - DNA, 19 bp, Homo sapiens
gaccataaagcacttactg

SEQ ID NO: 6815 - DNA, 19 bp, Homo sapiens
tgaccataaagcacttact

SEQ ID NO: 6816 - DNA, 19 bp, Homo sapiens
ctgaccataaagcacttac

SEQ ID NO: 6817 - DNA, 19 bp, Homo sapiens
actgaccataaagcactta

SEQ ID NO: 6818 - DNA, 19 bp, Homo sapiens
tactgaccataaagcactt

SEQ ID NO: 6819 - DNA, 19 bp, Homo sapiens
atactgaccataaagcact

SEQ ID NO: 6820 - DNA, 19 bp, Homo sapiens
aatactgaccataaagcac

SEQ ID NO: 6821 - DNA, 19 bp, Homo sapiens
gaatactgaccataaagca

SEQ ID NO: 6822 - DNA, 19 bp, Homo sapiens
agaatactgaccataaagc

SEQ ID NO: 6823 - DNA, 19 bp, Homo sapiens
tagaatactgaccataaag

SEQ ID NO: 6824 - DNA, 19 bp, Homo sapiens
atagaatactgaccataaa

SEQ ID NO: 6825 - DNA, 19 bp, Homo sapiens
catagaatactgaccataa

SEQ ID NO: 6826 - DNA, 19 bp, Homo sapiens
acatagaatactgaccata

SEQ ID NO: 6827 - DNA, 19 bp, Homo sapiens
cacatagaatactgaccat

SEQ ID NO: 6828 - DNA, 19 bp, Homo sapiens
ccacatagaatactgacca

SEQ ID NO: 6829 - DNA, 19 bp, Homo sapiens
tccacatagaatactgacc

SEQ ID NO: 6830 - DNA, 19 bp, Homo sapiens
ctccacatagaatactgac

SEQ ID NO: 6831 - DNA, 19 bp, Homo sapiens
tctccacatagaatactga

SEQ ID NO: 6832 - DNA, 19 bp, Homo sapiens
gtctccacatagaatactg

SEQ ID NO: 6833 - DNA, 19 bp, Homo sapiens
ggtctccacatagaatact

SEQ ID NO: 6834 - DNA, 19 bp, Homo sapiens
aggtctccacatagaatac

SEQ ID NO: 6835 - DNA, 19 bp, Homo sapiens
aaggtctccacatagaata

SEQ ID NO: 6836 - DNA, 19 bp, Homo sapiens
caaggtctccacatagaat

SEQ ID NO: 6837 - DNA, 19 bp, Homo sapiens
gcaaggtctccacatagaa

SEQ ID NO: 6838 - DNA, 19 bp, Homo sapiens
tgcaaggtctccacataga

SEQ ID NO: 6839 - DNA, 19 bp, Homo sapiens
gtgcaaggtctccacatag

SEQ ID NO: 6840 - DNA, 19 bp, Homo sapiens
ggtgcaaggtctccacata

SEQ ID NO: 6841 - DNA, 19 bp, Homo sapiens
aggtgcaaggtctccacat

SEQ ID NO: 6842 - DNA, 19 bp, Homo sapiens
aaggtgcaaggtctccaca

SEQ ID NO: 6843 - DNA, 19 bp, Homo sapiens
caaggtgcaaggtctccac

SEQ ID NO: 6844 - DNA, 19 bp, Homo sapiens
acaaggtgcaaggtctcca

SEQ ID NO: 6845 - DNA, 19 bp, Homo sapiens
tacaaggtgcaaggtctcc

SEQ ID NO: 6846 - DNA, 19 bp, Homo sapiens
ttacaaggtgcaaggtctc

SEQ ID NO: 6847 - DNA, 19 bp, Homo sapiens
attacaaggtgcaaggtct

SEQ ID NO: 6848 - DNA, 19 bp, Homo sapiens
gattacaaggtgcaaggtc

SEQ ID NO: 6849 - DNA, 19 bp, Homo sapiens
tgattacaaggtgcaaggt

SEQ ID NO: 6850 - DNA, 19 bp, Homo sapiens
atgattacaaggtgcaagg

SEQ ID NO: 6851 - DNA, 19 bp, Homo sapiens
gatgattacaaggtgcaag

SEQ ID NO: 6852 - DNA, 19 bp, Homo sapiens
tgatgattacaaggtgcaa

SEQ ID NO: 6853 - DNA, 19 bp, Homo sapiens
ttgatgattacaaggtgca

SEQ ID NO: 6854 - DNA, 19 bp, Homo sapiens
attgatgattacaaggtgc

SEQ ID NO: 6855 - DNA, 19 bp, Homo sapiens
tattgatgattacaaggtg

SEQ ID NO: 6856 - DNA, 19 bp, Homo sapiens
gtattgatgattacaaggt

SEQ ID NO: 6857 - DNA, 19 bp, Homo sapiens
tgtattgatgattacaagg

SEQ ID NO: 6858 - DNA, 19 bp, Homo sapiens
atgtattgatgattacaag

SEQ ID NO: 6859 - DNA, 19 bp, Homo sapiens
gatgtattgatgattacaa

SEQ ID NO: 6860 - DNA, 19 bp, Homo sapiens
ggatgtattgatgattaca

SEQ ID NO: 6861 - DNA, 19 bp, Homo sapiens
tggatgtattgatgattac

SEQ ID NO: 6862 - DNA, 19 bp, Homo sapiens
gtggatgtattgatgatta

SEQ ID NO: 6863 - DNA, 19 bp, Homo sapiens
ggtggatgtattgatgatt

SEQ ID NO: 6864 - DNA, 19 bp, Homo sapiens
tggtggatgtattgatgat

SEQ ID NO: 6865 - DNA, 19 bp, Homo sapiens
ttggtggatgtattgatga

SEQ ID NO: 6866 - DNA, 19 bp, Homo sapiens
tttggtggatgtattgatg

SEQ ID NO: 6867 - DNA, 19 bp, Homo sapiens
ttttggtggatgtattgat

SEQ ID NO: 6868 - DNA, 19 bp, Homo sapiens
tttttggtggatgtattga

SEQ ID NO: 6869 - DNA, 19 bp, Homo sapiens
atttttggtggatgtattg

SEQ ID NO: 6870 - DNA, 19 bp, Homo sapiens
tatttttggtggatgtatt

SEQ ID NO: 6871 - DNA, 19 bp, Homo sapiens
atatttttggtggatgtat

SEQ ID NO: 6872 - DNA, 19 bp, Homo sapiens
tatatttttggtggatgta

SEQ ID NO: 6873 - DNA, 19 bp, Homo sapiens
atatatttttggtggatgt

SEQ ID NO: 6874 - DNA, 19 bp, Homo sapiens
tatatatttttggtggatg

SEQ ID NO: 6875 - DNA, 19 bp, Homo sapiens
ttatatatttttggtggat

SEQ ID NO: 6876 - DNA, 19 bp, Homo sapiens
attatatatttttggtgga

SEQ ID NO: 6877 - DNA, 19 bp, Homo sapiens
cattatatatttttggtgg

SEQ ID NO: 6878 - DNA, 19 bp, Homo sapiens
acattatatatttttggtg

SEQ ID NO: 6879 - DNA, 19 bp, Homo sapiens
tacattatatatttttggt

SEQ ID NO: 6880 - DNA, 19 bp, Homo sapiens
gtacattatatatttttgg

SEQ ID NO: 6881 - DNA, 19 bp, Homo sapiens
ggtacattatatatttttg

SEQ ID NO: 6882 - DNA, 19 bp, Homo sapiens
tggtacattatatattttt

SEQ ID NO: 6883 - DNA, 19 bp, Homo sapiens
atggtacattatatatttt

SEQ ID NO: 6884 - DNA, 19 bp, Homo sapiens
tatggtacattatatattt

SEQ ID NO: 6885 - DNA, 19 bp, Homo sapiens
atatggtacattatatatt

SEQ ID NO: 6886 - DNA, 19 bp, Homo sapiens
tatatggtacattatatat

SEQ ID NO: 6887 - DNA, 19 bp, Homo sapiens
atatatggtacattatata

SEQ ID NO: 6888 - DNA, 19 bp, Homo sapiens
tatatatggtacattatat

SEQ ID NO: 6889 - DNA, 19 bp, Homo sapiens
atatatatggtacattata

SEQ ID NO: 6890 - DNA, 19 bp, Homo sapiens
aatatatatggtacattat

SEQ ID NO: 6891 - DNA, 19 bp, Homo sapiens
taatatatatggtacatta

SEQ ID NO: 6892 - DNA, 19 bp, Homo sapiens
ttaatatatatggtacatt

SEQ ID NO: 6893 - DNA, 19 bp, Homo sapiens
attaatatatatggtacat

SEQ ID NO: 6894 - DNA, 19 bp, Homo sapiens
tattaatatatatggtaca

SEQ ID NO: 6895 - DNA, 19 bp, Homo sapiens
ctattaatatatatggtac

SEQ ID NO: 6896 - DNA, 19 bp, Homo sapiens
actattaatatatatggta

SEQ ID NO: 6897 - DNA, 19 bp, Homo sapiens
gactattaatatatatggt

SEQ ID NO: 6898 - DNA, 19 bp, Homo sapiens
tgactattaatatatatgg

SEQ ID NO: 6899 - DNA, 19 bp, Homo sapiens
ttgactattaatatatatg

SEQ ID NO: 6900 - DNA, 19 bp, Homo sapiens
gttgactattaatatatat

SEQ ID NO: 6901 - DNA, 19 bp, Homo sapiens
tgttgactattaatatata

SEQ ID NO: 6902 - DNA, 19 bp, Homo sapiens
ttgttgactattaatatat

SEQ ID NO: 6903 - DNA, 19 bp, Homo sapiens
tttgttgactattaatata

SEQ ID NO: 6904 - DNA, 19 bp, Homo sapiens
atttgttgactattaatat

SEQ ID NO: 6905 - DNA, 19 bp, Homo sapiens
tatttgttgactattaata

SEQ ID NO: 6906 - DNA, 19 bp, Homo sapiens
gtatttgttgactattaat

SEQ ID NO: 6907 - DNA, 19 bp, Homo sapiens
agtatttgttgactattaa

SEQ ID NO: 6908 - DNA, 19 bp, Homo sapiens
gagtatttgttgactatta

SEQ ID NO: 6909 - DNA, 19 bp, Homo sapiens
tgagtatttgttgactatt

SEQ ID NO: 6910 - DNA, 19 bp, Homo sapiens
ctgagtatttgttgactat

SEQ ID NO: 6911 - DNA, 19 bp, Homo sapiens
tctgagtatttgttgacta

SEQ ID NO: 6912 - DNA, 19 bp, Homo sapiens
atctgagtatttgttgact

SEQ ID NO: 6913 - DNA, 19 bp, Homo sapiens
tatctgagtatttgttgac

SEQ ID NO: 6914 - DNA, 19 bp, Homo sapiens
atatctgagtatttgttga

SEQ ID NO: 6915 - DNA, 19 bp, Homo sapiens
aatatctgagtatttgttg

SEQ ID NO: 6916 - DNA, 19 bp, Homo sapiens
gaatatctgagtatttgtt

SEQ ID NO: 6917 - DNA, 19 bp, Homo sapiens
agaatatctgagtatttgt

SEQ ID NO: 6918 - DNA, 19 bp, Homo sapiens
tagaatatctgagtatttg

SEQ ID NO: 6919 - DNA, 19 bp, Homo sapiens
ttagaatatctgagtattt

SEQ ID NO: 6920 - DNA, 19 bp, Homo sapiens
cttagaatatctgagtatt

SEQ ID NO: 6921 - DNA, 19 bp, Homo sapiens
ccttagaatatctgagtat

SEQ ID NO: 6922 - DNA, 19 bp, Homo sapiens
accttagaatatctgagta

SEQ ID NO: 6923 - DNA, 19 bp, Homo sapiens
gaccttagaatatctgagt

SEQ ID NO: 6924 - DNA, 19 bp, Homo sapiens
tgaccttagaatatctgag

SEQ ID NO: 6925 - DNA, 19 bp, Homo sapiens
ttgaccttagaatatctga

SEQ ID NO: 6926 - DNA, 19 bp, Homo sapiens
attgaccttagaatatctg

SEQ ID NO: 6927 - DNA, 19 bp, Homo sapiens
cattgaccttagaatatct

SEQ ID NO: 6928 - DNA, 19 bp, Homo sapiens
gcattgaccttagaatatc

SEQ ID NO: 6929 - DNA, 19 bp, Homo sapiens
ggcattgaccttagaatat

SEQ ID NO: 6930 - DNA, 19 bp, Homo sapiens
tggcattgaccttagaata

SEQ ID NO: 6931 - DNA, 19 bp, Homo sapiens
atggcattgaccttagaat

SEQ ID NO: 6932 - DNA, 19 bp, Homo sapiens
aatggcattgaccttagaa

SEQ ID NO: 6933 - DNA, 19 bp, Homo sapiens
taatggcattgaccttaga

SEQ ID NO: 6934 - DNA, 19 bp, Homo sapiens
ataatggcattgaccttag

SEQ ID NO: 6935 - DNA, 19 bp, Homo sapiens
aataatggcattgacctta

SEQ ID NO: 6936 - DNA, 19 bp, Homo sapiens
aaataatggcattgacctt

SEQ ID NO: 6937 - DNA, 19 bp, Homo sapiens
caaataatggcattgacct

SEQ ID NO: 6938 - DNA, 19 bp, Homo sapiens
tcaaataatggcattgacc

SEQ ID NO: 6939 - DNA, 19 bp, Homo sapiens
atcaaataatggcattgac

SEQ ID NO: 6940 - DNA, 19 bp, Homo sapiens
aatcaaataatggcattga

SEQ ID NO: 6941 - DNA, 19 bp, Homo sapiens
taatcaaataatggcattg

SEQ ID NO: 6942 - DNA, 19 bp, Homo sapiens
ataatcaaataatggcatt

SEQ ID NO: 6943 - DNA, 19 bp, Homo sapiens
tataatcaaataatggcat

SEQ ID NO: 6944 - DNA, 19 bp, Homo sapiens
gtataatcaaataatggca

SEQ ID NO: 6945 - DNA, 19 bp, Homo sapiens
ggtataatcaaataatggc

SEQ ID NO: 6946 - DNA, 19 bp, Homo sapiens
tggtataatcaaataatgg

SEQ ID NO: 6947 - DNA, 19 bp, Homo sapiens
atggtataatcaaataatg

SEQ ID NO: 6948 - DNA, 19 bp, Homo sapiens
aatggtataatcaaataat

SEQ ID NO: 6949 - DNA, 19 bp, Homo sapiens
aaatggtataatcaaataa

SEQ ID NO: 6950 - DNA, 19 bp, Homo sapiens
aaaatggtataatcaaata

SEQ ID NO: 6951 - DNA, 19 bp, Homo sapiens
caaaatggtataatcaaat

SEQ ID NO: 6952 - DNA, 19 bp, Homo sapiens
tcaaaatggtataatcaaa

SEQ ID NO: 6953 - DNA, 19 bp, Homo sapiens
ctcaaaatggtataatcaa

SEQ ID NO: 6954 - DNA, 19 bp, Homo sapiens
cctcaaaatggtataatca

SEQ ID NO: 6955 - DNA, 19 bp, Homo sapiens
ccctcaaaatggtataatc

SEQ ID NO: 6956 - DNA, 19 bp, Homo sapiens
accctcaaaatggtataat

SEQ ID NO: 6957 - DNA, 19 bp, Homo sapiens
caccctcaaaatggtataa

SEQ ID NO: 6958 - DNA, 19 bp, Homo sapiens
tcaccctcaaaatggtata

SEQ ID NO: 6959 - DNA, 19 bp, Homo sapiens
ttcaccctcaaaatggtat

SEQ ID NO: 6960 - DNA, 19 bp, Homo sapiens
attcaccctcaaaatggta

SEQ ID NO: 6961 - DNA, 19 bp, Homo sapiens
tattcaccctcaaaatggt

SEQ ID NO: 6962 - DNA, 19 bp, Homo sapiens
atattcaccctcaaaatgg

SEQ ID NO: 6963 - DNA, 19 bp, Homo sapiens
catattcaccctcaaaatg

SEQ ID NO: 6964 - DNA, 19 bp, Homo sapiens
ccatattcaccctcaaaat

SEQ ID NO: 6965 - DNA, 19 bp, Homo sapiens
gccatattcaccctcaaaa

SEQ ID NO: 6966 - DNA, 19 bp, Homo sapiens
agccatattcaccctcaaa

SEQ ID NO: 6967 - DNA, 19 bp, Homo sapiens
tagccatattcaccctcaa

SEQ ID NO: 6968 - DNA, 19 bp, Homo sapiens
ctagccatattcaccctca

SEQ ID NO: 6969 - DNA, 19 bp, Homo sapiens
cctagccatattcaccctc

SEQ ID NO: 6970 - DNA, 19 bp, Homo sapiens
gcctagccatattcaccct

SEQ ID NO: 6971 - DNA, 19 bp, Homo sapiens
tgcctagccatattcaccc

SEQ ID NO: 6972 - DNA, 19 bp, Homo sapiens
gtgcctagccatattcacc

SEQ ID NO: 6973 - DNA, 19 bp, Homo sapiens
agtgcctagccatattcac

SEQ ID NO: 6974 - DNA, 19 bp, Homo sapiens
aagtgcctagccatattca

SEQ ID NO: 6975 - DNA, 19 bp, Homo sapiens
aaagtgcctagccatattc

SEQ ID NO: 6976 - DNA, 19 bp, Homo sapiens
taaagtgcctagccatatt

SEQ ID NO: 6977 - DNA, 19 bp, Homo sapiens
ctaaagtgcctagccatat

SEQ ID NO: 6978 - DNA, 19 bp, Homo sapiens
tctaaagtgcctagccata

SEQ ID NO: 6979 - DNA, 19 bp, Homo sapiens
atctaaagtgcctagccat

SEQ ID NO: 6980 - DNA, 19 bp, Homo sapiens
tatctaaagtgcctagcca

SEQ ID NO: 6981 - DNA, 19 bp, Homo sapiens
ttatctaaagtgcctagcc

SEQ ID NO: 6982 - DNA, 19 bp, Homo sapiens
cttatctaaagtgcctagc

SEQ ID NO: 6983 - DNA, 19 bp, Homo sapiens
gcttatctaaagtgcctag

SEQ ID NO: 6984 - DNA, 19 bp, Homo sapiens
ggcttatctaaagtgccta

SEQ ID NO: 6985 - DNA, 19 bp, Homo sapiens
aggcttatctaaagtgcct

SEQ ID NO: 6986 - DNA, 19 bp, Homo sapiens
aaggcttatctaaagtgcc

SEQ ID NO: 6987 - DNA, 19 bp, Homo sapiens
aaaggcttatctaaagtgc

SEQ ID NO: 6988 - DNA, 19 bp, Homo sapiens
aaaaggcttatctaaagtg

SEQ ID NO: 6989 - DNA, 19 bp, Homo sapiens
aaaaaggcttatctaaagt

SEQ ID NO: 6990 - DNA, 19 bp, Homo sapiens
taaaaaggcttatctaaag

SEQ ID NO: 6991 - DNA, 19 bp, Homo sapiens
ttaaaaaggcttatctaaa

SEQ ID NO: 6992 - DNA, 19 bp, Homo sapiens
tttaaaaaggcttatctaa

SEQ ID NO: 6993 - DNA, 19 bp, Homo sapiens
ttttaaaaaggcttatcta

SEQ ID NO: 6994 - DNA, 19 bp, Homo sapiens
attttaaaaaggcttatct

SEQ ID NO: 6995 - DNA, 19 bp, Homo sapiens
aattttaaaaaggcttatc

SEQ ID NO: 6996 - DNA, 19 bp, Homo sapiens
gaattttaaaaaggcttat

SEQ ID NO: 6997 - DNA, 19 bp, Homo sapiens
agaattttaaaaaggctta

SEQ ID NO: 6998 - DNA, 19 bp, Homo sapiens
aagaattttaaaaaggctt

SEQ ID NO: 6999 - DNA, 19 bp, Homo sapiens
aaagaattttaaaaaggct

SEQ ID NO: 7000 - DNA, 19 bp, Homo sapiens
gaaagaattttaaaaaggc

SEQ ID NO: 7001 - DNA, 19 bp, Homo sapiens
agaaagaattttaaaaagg

SEQ ID NO: 7002 - DNA, 19 bp, Homo sapiens
cagaaagaattttaaaaag

SEQ ID NO: 7003 - DNA, 19 bp, Homo sapiens
tcagaaagaattttaaaaa

SEQ ID NO: 7004 - DNA, 19 bp, Homo sapiens
atcagaaagaattttaaaa

SEQ ID NO: 7005 - DNA, 19 bp, Homo sapiens
aatcagaaagaattttaaa

SEQ ID NO: 7006 - DNA, 19 bp, Homo sapiens
aaatcagaaagaattttaa

SEQ ID NO: 7007 - DNA, 19 bp, Homo sapiens
aaaatcagaaagaatttta

SEQ ID NO: 7008 - DNA, 19 bp, Homo sapiens
taaaatcagaaagaatttt

SEQ ID NO: 7009 - DNA, 19 bp, Homo sapiens
ttaaaatcagaaagaattt

SEQ ID NO: 7010 - DNA, 19 bp, Homo sapiens
tttaaaatcagaaagaatt

SEQ ID NO: 7011 - DNA, 19 bp, Homo sapiens
atttaaaatcagaaagaat

SEQ ID NO: 7012 - DNA, 19 bp, Homo sapiens
tatttaaaatcagaaagaa

SEQ ID NO: 7013 - DNA, 19 bp, Homo sapiens
ttatttaaaatcagaaaga

SEQ ID NO: 7014 - DNA, 19 bp, Homo sapiens
attatttaaaatcagaaag

SEQ ID NO: 7015 - DNA, 19 bp, Homo sapiens
cattatttaaaatcagaaa

SEQ ID NO: 7016 - DNA, 19 bp, Homo sapiens
gcattatttaaaatcagaa

SEQ ID NO: 7017 - DNA, 19 bp, Homo sapiens
cgcattatttaaaatcaga

SEQ ID NO: 7018 - DNA, 19 bp, Homo sapiens
acgcattatttaaaatcag

SEQ ID NO: 7019 - DNA, 19 bp, Homo sapiens
gacgcattatttaaaatca

SEQ ID NO: 7020 - DNA, 19 bp, Homo sapiens
tgacgcattatttaaaatc

SEQ ID NO: 7021 - DNA, 19 bp, Homo sapiens
ttgacgcattatttaaaat

SEQ ID NO: 7022 - DNA, 19 bp, Homo sapiens
tttgacgcattatttaaaa

SEQ ID NO: 7023 - DNA, 19 bp, Homo sapiens
ttttgacgcattatttaaa

SEQ ID NO: 7024 - DNA, 19 bp, Homo sapiens
tttttgacgcattatttaa

SEQ ID NO: 7025 - DNA, 19 bp, Homo sapiens
ttttttgacgcattattta

SEQ ID NO: 7026 - DNA, 19 bp, Homo sapiens
attttttgacgcattattt

SEQ ID NO: 7027 - DNA, 19 bp, Homo sapiens
cattttttgacgcattatt

SEQ ID NO: 7028 - DNA, 19 bp, Homo sapiens
acattttttgacgcattat

SEQ ID NO: 7029 - DNA, 19 bp, Homo sapiens
cacattttttgacgcatta

SEQ ID NO: 7030 - DNA, 19 bp, Homo sapiens
gcacattttttgacgcatt

SEQ ID NO: 7031 - DNA, 19 bp, Homo sapiens
tgcacattttttgacgcat

SEQ ID NO: 7032 - DNA, 19 bp, Homo sapiens
ctgcacattttttgacgca

SEQ ID NO: 7033 - DNA, 19 bp, Homo sapiens
tctgcacattttttgacgc

SEQ ID NO: 7034 - DNA, 19 bp, Homo sapiens
ttctgcacattttttgacg

SEQ ID NO: 7035 - DNA, 19 bp, Homo sapiens
tttctgcacattttttgac

SEQ ID NO: 7036 - DNA, 19 bp, Homo sapiens
ttttctgcacattttttga

SEQ ID NO: 7037 - DNA, 19 bp, Homo sapiens
attttctgcacattttttg

SEQ ID NO: 7038 - DNA, 19 bp, Homo sapiens
cattttctgcacatttttt

SEQ ID NO: 7039 - DNA, 19 bp, Homo sapiens
acattttctgcacattttt

SEQ ID NO: 7040 - DNA, 19 bp, Homo sapiens
tacattttctgcacatttt

SEQ ID NO: 7041 - DNA, 19 bp, Homo sapiens
atacattttctgcacattt

SEQ ID NO: 7042 - DNA, 19 bp, Homo sapiens
aatacattttctgcacatt

SEQ ID NO: 7043 - DNA, 19 bp, Homo sapiens
caatacattttctgcacat

SEQ ID NO: 7044 - DNA, 19 bp, Homo sapiens
gcaatacattttctgcaca

SEQ ID NO: 7045 - DNA, 19 bp, Homo sapiens
tgcaatacattttctgcac

SEQ ID NO: 7046 - DNA, 19 bp, Homo sapiens
atgcaatacattttctgca

SEQ ID NO: 7047 - DNA, 19 bp, Homo sapiens
gatgcaatacattttctgc

SEQ ID NO: 7048 - DNA, 19 bp, Homo sapiens
ggatgcaatacattttctg

SEQ ID NO: 7049 - DNA, 19 bp, Homo sapiens
gggatgcaatacattttct

SEQ ID NO: 7050 - DNA, 19 bp, Homo sapiens
agggatgcaatacattttc

SEQ ID NO: 7051 - DNA, 19 bp, Homo sapiens
aagggatgcaatacatttt

SEQ ID NO: 7052 - DNA, 19 bp, Homo sapiens
caagggatgcaatacattt

SEQ ID NO: 7053 - DNA, 19 bp, Homo sapiens
tcaagggatgcaatacatt

SEQ ID NO: 7054 - DNA, 19 bp, Homo sapiens
atcaagggatgcaatacat

SEQ ID NO: 7055 - DNA, 19 bp, Homo sapiens
tatcaagggatgcaataca

SEQ ID NO: 7056 - DNA, 19 bp, Homo sapiens
gtatcaagggatgcaatac

SEQ ID NO: 7057 - DNA, 19 bp, Homo sapiens
agtatcaagggatgcaata

SEQ ID NO: 7058 - DNA, 19 bp, Homo sapiens
cagtatcaagggatgcaat

SEQ ID NO: 7059 - DNA, 19 bp, Homo sapiens
acagtatcaagggatgcaa

SEQ ID NO: 7060 - DNA, 19 bp, Homo sapiens
gacagtatcaagggatgca

SEQ ID NO: 7061 - DNA, 19 bp, Homo sapiens
agacagtatcaagggatgc

SEQ ID NO: 7062 - DNA, 19 bp, Homo sapiens
tagacagtatcaagggatg

SEQ ID NO: 7063 - DNA, 19 bp, Homo sapiens
ttagacagtatcaagggat

SEQ ID NO: 7064 - DNA, 19 bp, Homo sapiens
gttagacagtatcaaggga

SEQ ID NO: 7065 - DNA, 19 bp, Homo sapiens
cgttagacagtatcaaggg

SEQ ID NO: 7066 - DNA, 19 bp, Homo sapiens
tcgttagacagtatcaagg

SEQ ID NO: 7067 - DNA, 19 bp, Homo sapiens
ttcgttagacagtatcaag

SEQ ID NO: 7068 - DNA, 19 bp, Homo sapiens
attcgttagacagtatcaa

SEQ ID NO: 7069 - DNA, 19 bp, Homo sapiens
tattcgttagacagtatca

SEQ ID NO: 7070 - DNA, 19 bp, Homo sapiens
ctattcgttagacagtatc

SEQ ID NO: 7071 - DNA, 19 bp, Homo sapiens
gctattcgttagacagtat

SEQ ID NO: 7072 - DNA, 19 bp, Homo sapiens
tgctattcgttagacagta

SEQ ID NO: 7073 - DNA, 19 bp, Homo sapiens
gtgctattcgttagacagt

SEQ ID NO: 7074 - DNA, 19 bp, Homo sapiens
tgtgctattcgttagacag

SEQ ID NO: 7075 - DNA, 19 bp, Homo sapiens
atgtgctattcgttagaca

SEQ ID NO: 7076 - DNA, 19 bp, Homo sapiens
tatgtgctattcgttagac

SEQ ID NO: 7077 - DNA, 19 bp, Homo sapiens
ttatgtgctattcgttaga

SEQ ID NO: 7078 - DNA, 19 bp, Homo sapiens
gttatgtgctattcgttag

SEQ ID NO: 7079 - DNA, 19 bp, Homo sapiens
agttatgtgctattcgtta

SEQ ID NO: 7080 - DNA, 19 bp, Homo sapiens
gagttatgtgctattcgtt

SEQ ID NO: 7081 - DNA, 19 bp, Homo sapiens
tgagttatgtgctattcgt

SEQ ID NO: 7082 - DNA, 19 bp, Homo sapiens
atgagttatgtgctattcg

SEQ ID NO: 7083 - DNA, 19 bp, Homo sapiens
tatgagttatgtgctattc

SEQ ID NO: 7084 - DNA, 19 bp, Homo sapiens
atatgagttatgtgctatt

SEQ ID NO: 7085 - DNA, 19 bp, Homo sapiens
aatatgagttatgtgctat

SEQ ID NO: 7086 - DNA, 19 bp, Homo sapiens
caatatgagttatgtgcta

SEQ ID NO: 7087 - DNA, 19 bp, Homo sapiens
acaatatgagttatgtgct

SEQ ID NO: 7088 - DNA, 19 bp, Homo sapiens
cacaatatgagttatgtgc

SEQ ID NO: 7089 - DNA, 19 bp, Homo sapiens
tcacaatatgagttatgtg

SEQ ID NO: 7090 - DNA, 19 bp, Homo sapiens
ttcacaatatgagttatgt

SEQ ID NO: 7091 - DNA, 19 bp, Homo sapiens
attcacaatatgagttatg

SEQ ID NO: 7092 - DNA, 19 bp, Homo sapiens
gattcacaatatgagttat

SEQ ID NO: 7093 - DNA, 19 bp, Homo sapiens
ggattcacaatatgagtta

SEQ ID NO: 7094 - DNA, 19 bp, Homo sapiens
aggattcacaatatgagtt

SEQ ID NO: 7095 - DNA, 19 bp, Homo sapiens
taggattcacaatatgagt

SEQ ID NO: 7096 - DNA, 19 bp, Homo sapiens
ataggattcacaatatgag

SEQ ID NO: 7097 - DNA, 19 bp, Homo sapiens
cataggattcacaatatga

SEQ ID NO: 7098 - DNA, 19 bp, Homo sapiens
ccataggattcacaatatg

SEQ ID NO: 7099 - DNA, 19 bp, Homo sapiens
cccataggattcacaatat

SEQ ID NO: 7100 - DNA, 19 bp, Homo sapiens
acccataggattcacaata

SEQ ID NO: 7101 - DNA, 19 bp, Homo sapiens
gacccataggattcacaat

SEQ ID NO: 7102 - DNA, 19 bp, Homo sapiens
agacccataggattcacaa

SEQ ID NO: 7103 - DNA, 19 bp, Homo sapiens
aagacccataggattcaca

SEQ ID NO: 7104 - DNA, 19 bp, Homo sapiens
caagacccataggattcac

SEQ ID NO: 7105 - DNA, 19 bp, Homo sapiens
tcaagacccataggattca

SEQ ID NO: 7106 - DNA, 19 bp, Homo sapiens
ctcaagacccataggattc

SEQ ID NO: 7107 - DNA, 19 bp, Homo sapiens
cctcaagacccataggatt

SEQ ID NO: 7108 - DNA, 19 bp, Homo sapiens
gcctcaagacccataggat

SEQ ID NO: 7109 - DNA, 19 bp, Homo sapiens
ggcctcaagacccatagga

SEQ ID NO: 7110 - DNA, 19 bp, Homo sapiens
aggcctcaagacccatagg

SEQ ID NO: 7111 - DNA, 19 bp, Homo sapiens
caggcctcaagacccatag

SEQ ID NO: 7112 - DNA, 19 bp, Homo sapiens
acaggcctcaagacccata

SEQ ID NO: 7113 - DNA, 19 bp, Homo sapiens
tacaggcctcaagacccat

SEQ ID NO: 7114 - DNA, 19 bp, Homo sapiens
ctacaggcctcaagaccca

SEQ ID NO: 7115 - DNA, 19 bp, Homo sapiens
tctacaggcctcaagaccc

SEQ ID NO: 7116 - DNA, 19 bp, Homo sapiens
ttctacaggcctcaagacc

SEQ ID NO: 7117 - DNA, 19 bp, Homo sapiens
gttctacaggcctcaagac

SEQ ID NO: 7118 - DNA, 19 bp, Homo sapiens
ggttctacaggcctcaaga

SEQ ID NO: 7119 - DNA, 19 bp, Homo sapiens
tggttctacaggcctcaag

SEQ ID NO: 7120 - DNA, 19 bp, Homo sapiens
ttggttctacaggcctcaa

SEQ ID NO: 7121 - DNA, 19 bp, Homo sapiens
attggttctacaggcctca

SEQ ID NO: 7122 - DNA, 19 bp, Homo sapiens
gattggttctacaggcctc

SEQ ID NO: 7123 - DNA, 19 bp, Homo sapiens
acggctttctttgaggcca

SEQ ID NO: 7124 - DNA, 19 bp, Homo sapiens
cggctttctttgaggccag

SEQ ID NO: 7125 - DNA, 19 bp, Homo sapiens
ggctttctttgaggccagg

SEQ ID NO: 7126 - DNA, 19 bp, Homo sapiens
gctttctttgaggccagga

SEQ ID NO: 7127 - DNA, 19 bp, Homo sapiens
ctttctttgaggccaggac

SEQ ID NO: 7128 - DNA, 19 bp, Homo sapiens
tttctttgaggccaggact

SEQ ID NO: 7129 - DNA, 19 bp, Homo sapiens
ttctttgaggccaggactg

SEQ ID NO: 7130 - DNA, 19 bp, Homo sapiens
tctttgaggccaggactgg

SEQ ID NO: 7131 - DNA, 19 bp, Homo sapiens
ctttgaggccaggactggg

SEQ ID NO: 7132 - DNA, 19 bp, Homo sapiens
tttgaggccaggactgggt

SEQ ID NO: 7133 - DNA, 19 bp, Homo sapiens
ttgaggccaggactgggtg

SEQ ID NO: 7134 - DNA, 19 bp, Homo sapiens
tgaggccaggactgggtga

SEQ ID NO: 7135 - DNA, 19 bp, Homo sapiens
gaggccaggactgggtgat

SEQ ID NO: 7136 - DNA, 19 bp, Homo sapiens
aggccaggactgggtgatg

SEQ ID NO: 7137 - DNA, 19 bp, Homo sapiens
ggccaggactgggtgatgg

SEQ ID NO: 7138 - DNA, 19 bp, Homo sapiens
gccaggactgggtgatggt

SEQ ID NO: 7139 - DNA, 19 bp, Homo sapiens
ccaggactgggtgatggtg

SEQ ID NO: 7140 - DNA, 19 bp, Homo sapiens
caggactgggtgatggtgt

SEQ ID NO: 7141 - DNA, 19 bp, Homo sapiens
aggactgggtgatggtgtc

SEQ ID NO: 7142 - DNA, 19 bp, Homo sapiens
ggactgggtgatggtgtcg

SEQ ID NO: 7143 - DNA, 19 bp, Homo sapiens
gactgggtgatggtgtcgc

SEQ ID NO: 7144 - DNA, 19 bp, Homo sapiens
actgggtgatggtgtcgct

SEQ ID NO: 7145 - DNA, 19 bp, Homo sapiens
ctgggtgatggtgtcgcta

SEQ ID NO: 7146 - DNA, 19 bp, Homo sapiens
tgggtgatggtgtcgctac

SEQ ID NO: 7147 - DNA, 19 bp, Homo sapiens
gggtgatggtgtcgctacc

SEQ ID NO: 7148 - DNA, 19 bp, Homo sapiens
ggtgatggtgtcgctaccc

SEQ ID NO: 7149 - DNA, 19 bp, Homo sapiens
gtgatggtgtcgctacccc

SEQ ID NO: 7150 - DNA, 19 bp, Homo sapiens
tgatggtgtcgctaccccc

SEQ ID NO: 7151 - DNA, 19 bp, Homo sapiens
gatggtgtcgctacccccg

SEQ ID NO: 7152 - DNA, 19 bp, Homo sapiens
atggtgtcgctacccccgc

SEQ ID NO: 7153 - DNA, 19 bp, Homo sapiens
tggtgtcgctacccccgcc

SEQ ID NO: 7154 - DNA, 19 bp, Homo sapiens
ggtgtcgctacccccgccg

SEQ ID NO: 7155 - DNA, 19 bp, Homo sapiens
gtgtcgctacccccgccgc

SEQ ID NO: 7156 - DNA, 19 bp, Homo sapiens
tgtcgctacccccgccgca

SEQ ID NO: 7157 - DNA, 19 bp, Homo sapiens
gtcgctacccccgccgcag

SEQ ID NO: 7158 - DNA, 19 bp, Homo sapiens
tcgctacccccgccgcagt

SEQ ID NO: 7159 - DNA, 19 bp, Homo sapiens
cgctacccccgccgcagtc

SEQ ID NO: 7160 - DNA, 19 bp, Homo sapiens
gctacccccgccgcagtct

SEQ ID NO: 7161 - DNA, 19 bp, Homo sapiens
ctacccccgccgcagtctg

SEQ ID NO: 7162 - DNA, 19 bp, Homo sapiens
tacccccgccgcagtctga

SEQ ID NO: 7163 - DNA, 19 bp, Homo sapiens
acccccgccgcagtctgac

SEQ ID NO: 7164 - DNA, 19 bp, Homo sapiens
cccccgccgcagtctgacg

SEQ ID NO: 7165 - DNA, 19 bp, Homo sapiens
ccccgccgcagtctgacgt

SEQ ID NO: 7166 - DNA, 19 bp, Homo sapiens
cccgccgcagtctgacgtc

SEQ ID NO: 7167 - DNA, 19 bp, Homo sapiens
ccgccgcagtctgacgtca

SEQ ID NO: 7168 - DNA, 19 bp, Homo sapiens
cgccgcagtctgacgtcac

SEQ ID NO: 7169 - DNA, 19 bp, Homo sapiens
gccgcagtctgacgtcacg

SEQ ID NO: 7170 - DNA, 19 bp, Homo sapiens
ccgcagtctgacgtcacgc

SEQ ID NO: 7171 - DNA, 19 bp, Homo sapiens
cgcagtctgacgtcacgct

SEQ ID NO: 7172 - DNA, 19 bp, Homo sapiens
gcagtctgacgtcacgctg

SEQ ID NO: 7173 - DNA, 19 bp, Homo sapiens
cagtctgacgtcacgctgc

SEQ ID NO: 7174 - DNA, 19 bp, Homo sapiens
agtctgacgtcacgctgcc

SEQ ID NO: 7175 - DNA, 19 bp, Homo sapiens
gtctgacgtcacgctgccg

SEQ ID NO: 7176 - DNA, 19 bp, Homo sapiens
tctgacgtcacgctgccgg

SEQ ID NO: 7177 - DNA, 19 bp, Homo sapiens
ctgacgtcacgctgccggg

SEQ ID NO: 7178 - DNA, 19 bp, Homo sapiens
tgacgtcacgctgccgggc

SEQ ID NO: 7179 - DNA, 19 bp, Homo sapiens
gacgtcacgctgccgggcc

SEQ ID NO: 7180 - DNA, 19 bp, Homo sapiens
acgtcacgctgccgggccc

SEQ ID NO: 7181 - DNA, 19 bp, Homo sapiens
cgtcacgctgccgggcccc

SEQ ID NO: 7182 - DNA, 19 bp, Homo sapiens
gtcacgctgccgggcccca

SEQ ID NO: 7183 - DNA, 19 bp, Homo sapiens
tcacgctgccgggccccac

SEQ ID NO: 7184 - DNA, 19 bp, Homo sapiens
cacgctgccgggccccacc

SEQ ID NO: 7185 - DNA, 19 bp, Homo sapiens
acgctgccgggccccacca

SEQ ID NO: 7186 - DNA, 19 bp, Homo sapiens
cgctgccgggccccaccag

SEQ ID NO: 7187 - DNA, 19 bp, Homo sapiens
gctgccgggccccaccaga

SEQ ID NO: 7188 - DNA, 19 bp, Homo sapiens
ctgccgggccccaccagac

SEQ ID NO: 7189 - DNA, 19 bp, Homo sapiens
tgccgggccccaccagact

SEQ ID NO: 7190 - DNA, 19 bp, Homo sapiens
gccgggccccaccagactg

SEQ ID NO: 7191 - DNA, 19 bp, Homo sapiens
ccgggccccaccagactgg

SEQ ID NO: 7192 - DNA, 19 bp, Homo sapiens
cgggccccaccagactgga

SEQ ID NO: 7193 - DNA, 19 bp, Homo sapiens
gggccccaccagactggag

SEQ ID NO: 7194 - DNA, 19 bp, Homo sapiens
ggccccaccagactggagg

SEQ ID NO: 7195 - DNA, 19 bp, Homo sapiens
gccccaccagactggaggg

SEQ ID NO: 7196 - DNA, 19 bp, Homo sapiens
ccccaccagactggagggc

SEQ ID NO: 7197 - DNA, 19 bp, Homo sapiens
cccaccagactggagggcg

SEQ ID NO: 7198 - DNA, 19 bp, Homo sapiens
ccaccagactggagggcga

SEQ ID NO: 7199 - DNA, 19 bp, Homo sapiens
caccagactggagggcgag

SEQ ID NO: 7200 - DNA, 19 bp, Homo sapiens
accagactggagggcgagc

SEQ ID NO: 7201 - DNA, 19 bp, Homo sapiens
ccagactggagggcgagcg

SEQ ID NO: 7202 - DNA, 19 bp, Homo sapiens
cagactggagggcgagcgc

SEQ ID NO: 7203 - DNA, 19 bp, Homo sapiens
agactggagggcgagcgcc

SEQ ID NO: 7204 - DNA, 19 bp, Homo sapiens
gactggagggcgagcgcca

SEQ ID NO: 7205 - DNA, 19 bp, Homo sapiens
actggagggcgagcgccaa

SEQ ID NO: 7206 - DNA, 19 bp, Homo sapiens
ctggagggcgagcgccaag

SEQ ID NO: 7207 - DNA, 19 bp, Homo sapiens
tggagggcgagcgccaagg

SEQ ID NO: 7208 - DNA, 19 bp, Homo sapiens
ggagggcgagcgccaaggg

SEQ ID NO: 7209 - DNA, 19 bp, Homo sapiens
gagggcgagcgccaagggg

SEQ ID NO: 7210 - DNA, 19 bp, Homo sapiens
agggcgagcgccaagggga

SEQ ID NO: 7211 - DNA, 19 bp, Homo sapiens
gggcgagcgccaaggggac

SEQ ID NO: 7212 - DNA, 19 bp, Homo sapiens
ggcgagcgccaaggggacc

SEQ ID NO: 7213 - DNA, 19 bp, Homo sapiens
gcgagcgccaaggggacct

SEQ ID NO: 7214 - DNA, 19 bp, Homo sapiens
cgagcgccaaggggacctc

SEQ ID NO: 7215 - DNA, 19 bp, Homo sapiens
gagcgccaaggggacctca

SEQ ID NO: 7216 - DNA, 19 bp, Homo sapiens
agcgccaaggggacctcat

SEQ ID NO: 7217 - DNA, 19 bp, Homo sapiens
gcgccaaggggacctcatg

SEQ ID NO: 7218 - DNA, 19 bp, Homo sapiens
cgccaaggggacctcatgc

SEQ ID NO: 7219 - DNA, 19 bp, Homo sapiens
gccaaggggacctcatgca

SEQ ID NO: 7220 - DNA, 19 bp, Homo sapiens
ccaaggggacctcatgcag

SEQ ID NO: 7221 - DNA, 19 bp, Homo sapiens
caaggggacctcatgcagg

SEQ ID NO: 7222 - DNA, 19 bp, Homo sapiens
aaggggacctcatgcaggc

SEQ ID NO: 7223 - DNA, 19 bp, Homo sapiens
aggggacctcatgcaggca

SEQ ID NO: 7224 - DNA, 19 bp, Homo sapiens
ggggacctcatgcaggcac

SEQ ID NO: 7225 - DNA, 19 bp, Homo sapiens
gggacctcatgcaggcacc

SEQ ID NO: 7226 - DNA, 19 bp, Homo sapiens
ggacctcatgcaggcaccg

SEQ ID NO: 7227 - DNA, 19 bp, Homo sapiens
gacctcatgcaggcaccgg

SEQ ID NO: 7228 - DNA, 19 bp, Homo sapiens
acctcatgcaggcaccggg

SEQ ID NO: 7229 - DNA, 19 bp, Homo sapiens
cctcatgcaggcaccgggc

SEQ ID NO: 7230 - DNA, 19 bp, Homo sapiens
ctcatgcaggcaccgggcc

SEQ ID NO: 7231 - DNA, 19 bp, Homo sapiens
tcatgcaggcaccgggcct

SEQ ID NO: 7232 - DNA, 19 bp, Homo sapiens
catgcaggcaccgggcctc

SEQ ID NO: 7233 - DNA, 19 bp, Homo sapiens
atgcaggcaccgggcctcc

SEQ ID NO: 7234 - DNA, 19 bp, Homo sapiens
tgcaggcaccgggcctccc

SEQ ID NO: 7235 - DNA, 19 bp, Homo sapiens
gcaggcaccgggcctccca

SEQ ID NO: 7236 - DNA, 19 bp, Homo sapiens
caggcaccgggcctcccag

SEQ ID NO: 7237 - DNA, 19 bp, Homo sapiens
aggcaccgggcctcccagg

SEQ ID NO: 7238 - DNA, 19 bp, Homo sapiens
ggcaccgggcctcccaggc

SEQ ID NO: 7239 - DNA, 19 bp, Homo sapiens
gcaccgggcctcccaggct

SEQ ID NO: 7240 - DNA, 19 bp, Homo sapiens
caccgggcctcccaggctc

SEQ ID NO: 7241 - DNA, 19 bp, Homo sapiens
accgggcctcccaggctcc

SEQ ID NO: 7242 - DNA, 19 bp, Homo sapiens
ccgggcctcccaggctccc

SEQ ID NO: 7243 - DNA, 19 bp, Homo sapiens
cgggcctcccaggctcccc

SEQ ID NO: 7244 - DNA, 19 bp, Homo sapiens
gggcctcccaggctcccct

SEQ ID NO: 7245 - DNA, 19 bp, Homo sapiens
ggcctcccaggctcccctg

SEQ ID NO: 7246 - DNA, 19 bp, Homo sapiens
gcctcccaggctcccctgc

SEQ ID NO: 7247 - DNA, 19 bp, Homo sapiens
cctcccaggctcccctgcc

SEQ ID NO: 7248 - DNA, 19 bp, Homo sapiens
ctcccaggctcccctgccc

SEQ ID NO: 7249 - DNA, 19 bp, Homo sapiens
tcccaggctcccctgcccc

SEQ ID NO: 7250 - DNA, 19 bp, Homo sapiens
cccaggctcccctgcccca

SEQ ID NO: 7251 - DNA, 19 bp, Homo sapiens
ccaggctcccctgccccac

SEQ ID NO: 7252 - DNA, 19 bp, Homo sapiens
caggctcccctgccccaca

SEQ ID NO: 7253 - DNA, 19 bp, Homo sapiens
aggctcccctgccccacag

SEQ ID NO: 7254 - DNA, 19 bp, Homo sapiens
ggctcccctgccccacaga

SEQ ID NO: 7255 - DNA, 19 bp, Homo sapiens
gctcccctgccccacagag

SEQ ID NO: 7256 - DNA, 19 bp, Homo sapiens
ctcccctgccccacagagt

SEQ ID NO: 7257 - DNA, 19 bp, Homo sapiens
tcccctgccccacagagta

SEQ ID NO: 7258 - DNA, 19 bp, Homo sapiens
cccctgccccacagagtaa

SEQ ID NO: 7259 - DNA, 19 bp, Homo sapiens
ccctgccccacagagtaag

SEQ ID NO: 7260 - DNA, 19 bp, Homo sapiens
cctgccccacagagtaagc

SEQ ID NO: 7261 - DNA, 19 bp, Homo sapiens
ctgccccacagagtaagca

SEQ ID NO: 7262 - DNA, 19 bp, Homo sapiens
tgccccacagagtaagcat

SEQ ID NO: 7263 - DNA, 19 bp, Homo sapiens
gccccacagagtaagcatg

SEQ ID NO: 7264 - DNA, 19 bp, Homo sapiens
ccccacagagtaagcatgc

SEQ ID NO: 7265 - DNA, 19 bp, Homo sapiens
cccacagagtaagcatgcc

SEQ ID NO: 7266 - DNA, 19 bp, Homo sapiens
ccacagagtaagcatgccg

SEQ ID NO: 7267 - DNA, 19 bp, Homo sapiens
cacagagtaagcatgccgg

SEQ ID NO: 7268 - DNA, 19 bp, Homo sapiens
acagagtaagcatgccggc

SEQ ID NO: 7269 - DNA, 19 bp, Homo sapiens
cagagtaagcatgccggct

SEQ ID NO: 7270 - DNA, 19 bp, Homo sapiens
agagtaagcatgccggctt

SEQ ID NO: 7271 - DNA, 19 bp, Homo sapiens
gagtaagcatgccggcttc

SEQ ID NO: 7272 - DNA, 19 bp, Homo sapiens
agtaagcatgccggcttca

SEQ ID NO: 7273 - DNA, 19 bp, Homo sapiens
gtaagcatgccggcttcag

SEQ ID NO: 7274 - DNA, 19 bp, Homo sapiens
taagcatgccggcttcagc

SEQ ID NO: 7275 - DNA, 19 bp, Homo sapiens
aagcatgccggcttcagct

SEQ ID NO: 7276 - DNA, 19 bp, Homo sapiens
agcatgccggcttcagctg

SEQ ID NO: 7277 - DNA, 19 bp, Homo sapiens
gcatgccggcttcagctgc

SEQ ID NO: 7278 - DNA, 19 bp, Homo sapiens
catgccggcttcagctgct

SEQ ID NO: 7279 - DNA, 19 bp, Homo sapiens
atgccggcttcagctgctc

SEQ ID NO: 7280 - DNA, 19 bp, Homo sapiens
tgccggcttcagctgctcg

SEQ ID NO: 7281 - DNA, 19 bp, Homo sapiens
gccggcttcagctgctcgt

SEQ ID NO: 7282 - DNA, 19 bp, Homo sapiens
ccggcttcagctgctcgtc

SEQ ID NO: 7283 - DNA, 19 bp, Homo sapiens
cggcttcagctgctcgtca

SEQ ID NO: 7284 - DNA, 19 bp, Homo sapiens
ggcttcagctgctcgtcat

SEQ ID NO: 7285 - DNA, 19 bp, Homo sapiens
gcttcagctgctcgtcatt

SEQ ID NO: 7286 - DNA, 19 bp, Homo sapiens
cttcagctgctcgtcattt

SEQ ID NO: 7287 - DNA, 19 bp, Homo sapiens
ttcagctgctcgtcatttg

SEQ ID NO: 7288 - DNA, 19 bp, Homo sapiens
tcagctgctcgtcatttgt

SEQ ID NO: 7289 - DNA, 19 bp, Homo sapiens
cagctgctcgtcatttgtg

SEQ ID NO: 7290 - DNA, 19 bp, Homo sapiens
agctgctcgtcatttgtgt

SEQ ID NO: 7291 - DNA, 19 bp, Homo sapiens
gctgctcgtcatttgtgtc

SEQ ID NO: 7292 - DNA, 19 bp, Homo sapiens
ctgctcgtcatttgtgtcc

SEQ ID NO: 7293 - DNA, 19 bp, Homo sapiens
tgctcgtcatttgtgtccg

SEQ ID NO: 7294 - DNA, 19 bp, Homo sapiens
gctcgtcatttgtgtccga

SEQ ID NO: 7295 - DNA, 19 bp, Homo sapiens
ctcgtcatttgtgtccgac

SEQ ID NO: 7296 - DNA, 19 bp, Homo sapiens
tcgtcatttgtgtccgacg

SEQ ID NO: 7297 - DNA, 19 bp, Homo sapiens
cgtcatttgtgtccgacgg

SEQ ID NO: 7298 - DNA, 19 bp, Homo sapiens
gtcatttgtgtccgacggc

SEQ ID NO: 7299 - DNA, 19 bp, Homo sapiens
tcatttgtgtccgacggcc

SEQ ID NO: 7300 - DNA, 19 bp, Homo sapiens
catttgtgtccgacggccc

SEQ ID NO: 7301 - DNA, 19 bp, Homo sapiens
atttgtgtccgacggccct

SEQ ID NO: 7302 - DNA, 19 bp, Homo sapiens
tttgtgtccgacggccctc

SEQ ID NO: 7303 - DNA, 19 bp, Homo sapiens
ttgtgtccgacggccctcc

SEQ ID NO: 7304 - DNA, 19 bp, Homo sapiens
tgtgtccgacggccctcca

SEQ ID NO: 7305 - DNA, 19 bp, Homo sapiens
gtgtccgacggccctccag

SEQ ID NO: 7306 - DNA, 19 bp, Homo sapiens
tgtccgacggccctccaga

SEQ ID NO: 7307 - DNA, 19 bp, Homo sapiens
gtccgacggccctccagag

SEQ ID NO: 7308 - DNA, 19 bp, Homo sapiens
tccgacggccctccagaga

SEQ ID NO: 7309 - DNA, 19 bp, Homo sapiens
ccgacggccctccagagag

SEQ ID NO: 7310 - DNA, 19 bp, Homo sapiens
cgacggccctccagagagg

SEQ ID NO: 7311 - DNA, 19 bp, Homo sapiens
gacggccctccagagagga

SEQ ID NO: 7312 - DNA, 19 bp, Homo sapiens
acggccctccagagaggac

SEQ ID NO: 7313 - DNA, 19 bp, Homo sapiens
cggccctccagagaggaca

SEQ ID NO: 7314 - DNA, 19 bp, Homo sapiens
ggccctccagagaggacac

SEQ ID NO: 7315 - DNA, 19 bp, Homo sapiens
gccctccagagaggacacc

SEQ ID NO: 7316 - DNA, 19 bp, Homo sapiens
ccctccagagaggacaccc

SEQ ID NO: 7317 - DNA, 19 bp, Homo sapiens
cctccagagaggacaccct

SEQ ID NO: 7318 - DNA, 19 bp, Homo sapiens
ctccagagaggacaccctc

SEQ ID NO: 7319 - DNA, 19 bp, Homo sapiens
tccagagaggacaccctca

SEQ ID NO: 7320 - DNA, 19 bp, Homo sapiens
ccagagaggacaccctcac

SEQ ID NO: 7321 - DNA, 19 bp, Homo sapiens
cagagaggacaccctcact

SEQ ID NO: 7322 - DNA, 19 bp, Homo sapiens
agagaggacaccctcactg

SEQ ID NO: 7323 - DNA, 19 bp, Homo sapiens
gagaggacaccctcactgc

SEQ ID NO: 7324 - DNA, 19 bp, Homo sapiens
agaggacaccctcactgcc

SEQ ID NO: 7325 - DNA, 19 bp, Homo sapiens
gaggacaccctcactgccc

SEQ ID NO: 7326 - DNA, 19 bp, Homo sapiens
aggacaccctcactgcccc

SEQ ID NO: 7327 - DNA, 19 bp, Homo sapiens
ggacaccctcactgccccc

SEQ ID NO: 7328 - DNA, 19 bp, Homo sapiens
gacaccctcactgccccca

SEQ ID NO: 7329 - DNA, 19 bp, Homo sapiens
acaccctcactgcccccac

SEQ ID NO: 7330 - DNA, 19 bp, Homo sapiens
caccctcactgcccccaca

SEQ ID NO: 7331 - DNA, 19 bp, Homo sapiens
accctcactgcccccacac

SEQ ID NO: 7332 - DNA, 19 bp, Homo sapiens
ccctcactgcccccacaca

SEQ ID NO: 7333 - DNA, 19 bp, Homo sapiens
cctcactgcccccacacag

SEQ ID NO: 7334 - DNA, 19 bp, Homo sapiens
ctcactgcccccacacagc

SEQ ID NO: 7335 - DNA, 19 bp, Homo sapiens
tcactgcccccacacagcc

SEQ ID NO: 7336 - DNA, 19 bp, Homo sapiens
cactgcccccacacagccc

SEQ ID NO: 7337 - DNA, 19 bp, Homo sapiens
actgcccccacacagcccc

SEQ ID NO: 7338 - DNA, 19 bp, Homo sapiens
ctgcccccacacagccccc

SEQ ID NO: 7339 - DNA, 19 bp, Homo sapiens
tgcccccacacagcccccg

SEQ ID NO: 7340 - DNA, 19 bp, Homo sapiens
gcccccacacagcccccgc

SEQ ID NO: 7341 - DNA, 19 bp, Homo sapiens
cccccacacagcccccgca

SEQ ID NO: 7342 - DNA, 19 bp, Homo sapiens
ccccacacagcccccgcat

SEQ ID NO: 7343 - DNA, 19 bp, Homo sapiens
cccacacagcccccgcatt

SEQ ID NO: 7344 - DNA, 19 bp, Homo sapiens
ccacacagcccccgcattg

SEQ ID NO: 7345 - DNA, 19 bp, Homo sapiens
cacacagcccccgcattgc

SEQ ID NO: 7346 - DNA, 19 bp, Homo sapiens
acacagcccccgcattgcg

SEQ ID NO: 7347 - DNA, 19 bp, Homo sapiens
cacagcccccgcattgcgt

SEQ ID NO: 7348 - DNA, 19 bp, Homo sapiens
acagcccccgcattgcgtc

SEQ ID NO: 7349 - DNA, 19 bp, Homo sapiens
cagcccccgcattgcgtca

SEQ ID NO: 7350 - DNA, 19 bp, Homo sapiens
agcccccgcattgcgtcac

SEQ ID NO: 7351 - DNA, 19 bp, Homo sapiens
gcccccgcattgcgtcacc

SEQ ID NO: 7352 - DNA, 19 bp, Homo sapiens
cccccgcattgcgtcacca

SEQ ID NO: 7353 - DNA, 19 bp, Homo sapiens
ccccgcattgcgtcaccag

SEQ ID NO: 7354 - DNA, 19 bp, Homo sapiens
cccgcattgcgtcaccagg

SEQ ID NO: 7355 - DNA, 19 bp, Homo sapiens
ccgcattgcgtcaccaggg

SEQ ID NO: 7356 - DNA, 19 bp, Homo sapiens
cgcattgcgtcaccagggc

SEQ ID NO: 7357 - DNA, 19 bp, Homo sapiens
gcattgcgtcaccagggcc

SEQ ID NO: 7358 - DNA, 19 bp, Homo sapiens
cattgcgtcaccagggccc

SEQ ID NO: 7359 - DNA, 19 bp, Homo sapiens
attgcgtcaccagggcccg

SEQ ID NO: 7360 - DNA, 19 bp, Homo sapiens
ttgcgtcaccagggcccga

SEQ ID NO: 7361 - DNA, 19 bp, Homo sapiens
tgcgtcaccagggcccgag

SEQ ID NO: 7362 - DNA, 19 bp, Homo sapiens
gcgtcaccagggcccgagc

SEQ ID NO: 7363 - DNA, 19 bp, Homo sapiens
cgtcaccagggcccgagca

SEQ ID NO: 7364 - DNA, 19 bp, Homo sapiens
gtcaccagggcccgagcaa

SEQ ID NO: 7365 - DNA, 19 bp, Homo sapiens
tcaccagggcccgagcaag

SEQ ID NO: 7366 - DNA, 19 bp, Homo sapiens
caccagggcccgagcaagt

SEQ ID NO: 7367 - DNA, 19 bp, Homo sapiens
accagggcccgagcaagtc

SEQ ID NO: 7368 - DNA, 19 bp, Homo sapiens
ccagggcccgagcaagtcc

SEQ ID NO: 7369 - DNA, 19 bp, Homo sapiens
cagggcccgagcaagtcca

SEQ ID NO: 7370 - DNA, 19 bp, Homo sapiens
agggcccgagcaagtccag

SEQ ID NO: 7371 - DNA, 19 bp, Homo sapiens
gggcccgagcaagtccagg

SEQ ID NO: 7372 - DNA, 19 bp, Homo sapiens
ggcccgagcaagtccaggg

SEQ ID NO: 7373 - DNA, 19 bp, Homo sapiens
gcccgagcaagtccagggc

SEQ ID NO: 7374 - DNA, 19 bp, Homo sapiens
cccgagcaagtccagggcc

SEQ ID NO: 7375 - DNA, 19 bp, Homo sapiens
ccgagcaagtccagggcca

SEQ ID NO: 7376 - DNA, 19 bp, Homo sapiens
cgagcaagtccagggccac

SEQ ID NO: 7377 - DNA, 19 bp, Homo sapiens
gagcaagtccagggccact

SEQ ID NO: 7378 - DNA, 19 bp, Homo sapiens
agcaagtccagggccactg

SEQ ID NO: 7379 - DNA, 19 bp, Homo sapiens
gcaagtccagggccactgc

SEQ ID NO: 7380 - DNA, 19 bp, Homo sapiens
caagtccagggccactgcc

SEQ ID NO: 7381 - DNA, 19 bp, Homo sapiens
aagtccagggccactgccc

SEQ ID NO: 7382 - DNA, 19 bp, Homo sapiens
agtccagggccactgccca

SEQ ID NO: 7383 - DNA, 19 bp, Homo sapiens
gtccagggccactgcccag

SEQ ID NO: 7384 - DNA, 19 bp, Homo sapiens
tccagggccactgcccagc

SEQ ID NO: 7385 - DNA, 19 bp, Homo sapiens
ccagggccactgcccagcc

SEQ ID NO: 7386 - DNA, 19 bp, Homo sapiens
cagggccactgcccagccg

SEQ ID NO: 7387 - DNA, 19 bp, Homo sapiens
agggccactgcccagccgg

SEQ ID NO: 7388 - DNA, 19 bp, Homo sapiens
gggccactgcccagccggc

SEQ ID NO: 7389 - DNA, 19 bp, Homo sapiens
ggccactgcccagccggcc

SEQ ID NO: 7390 - DNA, 19 bp, Homo sapiens
gccactgcccagccggccc

SEQ ID NO: 7391 - DNA, 19 bp, Homo sapiens
ccactgcccagccggcccc

SEQ ID NO: 7392 - DNA, 19 bp, Homo sapiens
cactgcccagccggccccg

SEQ ID NO: 7393 - DNA, 19 bp, Homo sapiens
actgcccagccggccccgg

SEQ ID NO: 7394 - DNA, 19 bp, Homo sapiens
ctgcccagccggccccggc

SEQ ID NO: 7395 - DNA, 19 bp, Homo sapiens
tgcccagccggccccggcc

SEQ ID NO: 7396 - DNA, 19 bp, Homo sapiens
gcccagccggccccggccc

SEQ ID NO: 7397 - DNA, 19 bp, Homo sapiens
cccagccggccccggccct

SEQ ID NO: 7398 - DNA, 19 bp, Homo sapiens
ccagccggccccggccctg

SEQ ID NO: 7399 - DNA, 19 bp, Homo sapiens
cagccggccccggccctgg

SEQ ID NO: 7400 - DNA, 19 bp, Homo sapiens
agccggccccggccctggg

SEQ ID NO: 7401 - DNA, 19 bp, Homo sapiens
gccggccccggccctgggc

SEQ ID NO: 7402 - DNA, 19 bp, Homo sapiens
ccggccccggccctgggcc

SEQ ID NO: 7403 - DNA, 19 bp, Homo sapiens
cggccccggccctgggccc

SEQ ID NO: 7404 - DNA, 19 bp, Homo sapiens
ggccccggccctgggccct

SEQ ID NO: 7405 - DNA, 19 bp, Homo sapiens
gccccggccctgggccctt

SEQ ID NO: 7406 - DNA, 19 bp, Homo sapiens
ccccggccctgggcccttc

SEQ ID NO: 7407 - DNA, 19 bp, Homo sapiens
cccggccctgggcccttca

SEQ ID NO: 7408 - DNA, 19 bp, Homo sapiens
ccggccctgggcccttcag

SEQ ID NO: 7409 - DNA, 19 bp, Homo sapiens
cggccctgggcccttcagg

SEQ ID NO: 7410 - DNA, 19 bp, Homo sapiens
ggccctgggcccttcaggc

SEQ ID NO: 7411 - DNA, 19 bp, Homo sapiens
gccctgggcccttcaggct

SEQ ID NO: 7412 - DNA, 19 bp, Homo sapiens
ccctgggcccttcaggctc

SEQ ID NO: 7413 - DNA, 19 bp, Homo sapiens
cctgggcccttcaggctct

SEQ ID NO: 7414 - DNA, 19 bp, Homo sapiens
ctgggcccttcaggctctc

SEQ ID NO: 7415 - DNA, 19 bp, Homo sapiens
tgggcccttcaggctctca

SEQ ID NO: 7416 - DNA, 19 bp, Homo sapiens
gggcccttcaggctctcac

SEQ ID NO: 7417 - DNA, 19 bp, Homo sapiens
ggcccttcaggctctcacc

SEQ ID NO: 7418 - DNA, 19 bp, Homo sapiens
gcccttcaggctctcaccc

SEQ ID NO: 7419 - DNA, 19 bp, Homo sapiens
cccttcaggctctcaccct

SEQ ID NO: 7420 - DNA, 19 bp, Homo sapiens
ccttcaggctctcaccctc

SEQ ID NO: 7421 - DNA, 19 bp, Homo sapiens
cttcaggctctcaccctca

SEQ ID NO: 7422 - DNA, 19 bp, Homo sapiens
ttcaggctctcaccctcag

SEQ ID NO: 7423 - DNA, 19 bp, Homo sapiens
tcaggctctcaccctcaga

SEQ ID NO: 7424 - DNA, 19 bp, Homo sapiens
caggctctcaccctcagac

SEQ ID NO: 7425 - DNA, 19 bp, Homo sapiens
aggctctcaccctcagaca

SEQ ID NO: 7426 - DNA, 19 bp, Homo sapiens
ggctctcaccctcagacaa

SEQ ID NO: 7427 - DNA, 19 bp, Homo sapiens
gctctcaccctcagacaag

SEQ ID NO: 7428 - DNA, 19 bp, Homo sapiens
ctctcaccctcagacaagt

SEQ ID NO: 7429 - DNA, 19 bp, Homo sapiens
tctcaccctcagacaagta

SEQ ID NO: 7430 - DNA, 19 bp, Homo sapiens
ctcaccctcagacaagtat

SEQ ID NO: 7431 - DNA, 19 bp, Homo sapiens
tcaccctcagacaagtatc

SEQ ID NO: 7432 - DNA, 19 bp, Homo sapiens
caccctcagacaagtatcc

SEQ ID NO: 7433 - DNA, 19 bp, Homo sapiens
accctcagacaagtatcct

SEQ ID NO: 7434 - DNA, 19 bp, Homo sapiens
ccctcagacaagtatcctg

SEQ ID NO: 7435 - DNA, 19 bp, Homo sapiens
cctcagacaagtatcctgg

SEQ ID NO: 7436 - DNA, 19 bp, Homo sapiens
ctcagacaagtatcctggc

SEQ ID NO: 7437 - DNA, 19 bp, Homo sapiens
tcagacaagtatcctggct

SEQ ID NO: 7438 - DNA, 19 bp, Homo sapiens
cagacaagtatcctggctt

SEQ ID NO: 7439 - DNA, 19 bp, Homo sapiens
agacaagtatcctggcttt

SEQ ID NO: 7440 - DNA, 19 bp, Homo sapiens
gacaagtatcctggctttg

SEQ ID NO: 7441 - DNA, 19 bp, Homo sapiens
acaagtatcctggctttgg

SEQ ID NO: 7442 - DNA, 19 bp, Homo sapiens
caagtatcctggctttggc

SEQ ID NO: 7443 - DNA, 19 bp, Homo sapiens
aagtatcctggctttggct

SEQ ID NO: 7444 - DNA, 19 bp, Homo sapiens
agtatcctggctttggctt

SEQ ID NO: 7445 - DNA, 19 bp, Homo sapiens
gtatcctggctttggcttt

SEQ ID NO: 7446 - DNA, 19 bp, Homo sapiens
tatcctggctttggctttg

SEQ ID NO: 7447 - DNA, 19 bp, Homo sapiens
atcctggctttggctttga

SEQ ID NO: 7448 - DNA, 19 bp, Homo sapiens
tcctggctttggctttgag

SEQ ID NO: 7449 - DNA, 19 bp, Homo sapiens
cctggctttggctttgagg

SEQ ID NO: 7450 - DNA, 19 bp, Homo sapiens
ctggctttggctttgagga

SEQ ID NO: 7451 - DNA, 19 bp, Homo sapiens
tggctttggctttgaggag

SEQ ID NO: 7452 - DNA, 19 bp, Homo sapiens
ggctttggctttgaggagg

SEQ ID NO: 7453 - DNA, 19 bp, Homo sapiens
gctttggctttgaggaggc

SEQ ID NO: 7454 - DNA, 19 bp, Homo sapiens
ctttggctttgaggaggcc

SEQ ID NO: 7455 - DNA, 19 bp, Homo sapiens
tttggctttgaggaggccg

SEQ ID NO: 7456 - DNA, 19 bp, Homo sapiens
ttggctttgaggaggccgc

SEQ ID NO: 7457 - DNA, 19 bp, Homo sapiens
tggctttgaggaggccgca

SEQ ID NO: 7458 - DNA, 19 bp, Homo sapiens
ggctttgaggaggccgcag

SEQ ID NO: 7459 - DNA, 19 bp, Homo sapiens
gctttgaggaggccgcagc

SEQ ID NO: 7460 - DNA, 19 bp, Homo sapiens
ctttgaggaggccgcagca

SEQ ID NO: 7461 - DNA, 19 bp, Homo sapiens
tttgaggaggccgcagcaa

SEQ ID NO: 7462 - DNA, 19 bp, Homo sapiens
ttgaggaggccgcagcaag

SEQ ID NO: 7463 - DNA, 19 bp, Homo sapiens
tgaggaggccgcagcaagc

SEQ ID NO: 7464 - DNA, 19 bp, Homo sapiens
gaggaggccgcagcaagca

SEQ ID NO: 7465 - DNA, 19 bp, Homo sapiens
aggaggccgcagcaagcag

SEQ ID NO: 7466 - DNA, 19 bp, Homo sapiens
ggaggccgcagcaagcagc

SEQ ID NO: 7467 - DNA, 19 bp, Homo sapiens
gaggccgcagcaagcagcc

SEQ ID NO: 7468 - DNA, 19 bp, Homo sapiens
aggccgcagcaagcagccc

SEQ ID NO: 7469 - DNA, 19 bp, Homo sapiens
ggccgcagcaagcagccct

SEQ ID NO: 7470 - DNA, 19 bp, Homo sapiens
gccgcagcaagcagccctg

SEQ ID NO: 7471 - DNA, 19 bp, Homo sapiens
ccgcagcaagcagccctgg

SEQ ID NO: 7472 - DNA, 19 bp, Homo sapiens
cgcagcaagcagccctggg

SEQ ID NO: 7473 - DNA, 19 bp, Homo sapiens
gcagcaagcagccctgggc

SEQ ID NO: 7474 - DNA, 19 bp, Homo sapiens
cagcaagcagccctgggcg

SEQ ID NO: 7475 - DNA, 19 bp, Homo sapiens
agcaagcagccctgggcga

SEQ ID NO: 7476 - DNA, 19 bp, Homo sapiens
gcaagcagccctgggcgat

SEQ ID NO: 7477 - DNA, 19 bp, Homo sapiens
caagcagccctgggcgatt

SEQ ID NO: 7478 - DNA, 19 bp, Homo sapiens
aagcagccctgggcgattc

SEQ ID NO: 7479 - DNA, 19 bp, Homo sapiens
agcagccctgggcgattcc

SEQ ID NO: 7480 - DNA, 19 bp, Homo sapiens
gcagccctgggcgattcct

SEQ ID NO: 7481 - DNA, 19 bp, Homo sapiens
cagccctgggcgattcctc

SEQ ID NO: 7482 - DNA, 19 bp, Homo sapiens
agccctgggcgattcctca

SEQ ID NO: 7483 - DNA, 19 bp, Homo sapiens
gccctgggcgattcctcaa

SEQ ID NO: 7484 - DNA, 19 bp, Homo sapiens
ccctgggcgattcctcaag

SEQ ID NO: 7485 - DNA, 19 bp, Homo sapiens
cctgggcgattcctcaagg

SEQ ID NO: 7486 - DNA, 19 bp, Homo sapiens
ctgggcgattcctcaaggg

SEQ ID NO: 7487 - DNA, 19 bp, Homo sapiens
tgggcgattcctcaagggc

SEQ ID NO: 7488 - DNA, 19 bp, Homo sapiens
gggcgattcctcaagggca

SEQ ID NO: 7489 - DNA, 19 bp, Homo sapiens
ggcgattcctcaagggcag

SEQ ID NO: 7490 - DNA, 19 bp, Homo sapiens
gcgattcctcaagggcagc

SEQ ID NO: 7491 - DNA, 19 bp, Homo sapiens
cgattcctcaagggcagcc

SEQ ID NO: 7492 - DNA, 19 bp, Homo sapiens
gattcctcaagggcagcca

SEQ ID NO: 7493 - DNA, 19 bp, Homo sapiens
attcctcaagggcagccac

SEQ ID NO: 7494 - DNA, 19 bp, Homo sapiens
ttcctcaagggcagccacg

SEQ ID NO: 7495 - DNA, 19 bp, Homo sapiens
tcctcaagggcagccacgc

SEQ ID NO: 7496 - DNA, 19 bp, Homo sapiens
cctcaagggcagccacgcg

SEQ ID NO: 7497 - DNA, 19 bp, Homo sapiens
ctcaagggcagccacgcgc

SEQ ID NO: 7498 - DNA, 19 bp, Homo sapiens
tcaagggcagccacgcgcc

SEQ ID NO: 7499 - DNA, 19 bp, Homo sapiens
caagggcagccacgcgccc

SEQ ID NO: 7500 - DNA, 19 bp, Homo sapiens
aagggcagccacgcgccct

SEQ ID NO: 7501 - DNA, 19 bp, Homo sapiens
agggcagccacgcgccctt

SEQ ID NO: 7502 - DNA, 19 bp, Homo sapiens
gggcagccacgcgcccttc

SEQ ID NO: 7503 - DNA, 19 bp, Homo sapiens
ggcagccacgcgcccttcc

SEQ ID NO: 7504 - DNA, 19 bp, Homo sapiens
gcagccacgcgcccttcca

SEQ ID NO: 7505 - DNA, 19 bp, Homo sapiens
cagccacgcgcccttccac

SEQ ID NO: 7506 - DNA, 19 bp, Homo sapiens
agccacgcgcccttccacc

SEQ ID NO: 7507 - DNA, 19 bp, Homo sapiens
gccacgcgcccttccaccc

SEQ ID NO: 7508 - DNA, 19 bp, Homo sapiens
ccacgcgcccttccacccg

SEQ ID NO: 7509 - DNA, 19 bp, Homo sapiens
cacgcgcccttccacccgt

SEQ ID NO: 7510 - DNA, 19 bp, Homo sapiens
acgcgcccttccacccgta

SEQ ID NO: 7511 - DNA, 19 bp, Homo sapiens
cgcgcccttccacccgtac

SEQ ID NO: 7512 - DNA, 19 bp, Homo sapiens
gcgcccttccacccgtaca

SEQ ID NO: 7513 - DNA, 19 bp, Homo sapiens
cgcccttccacccgtacaa

SEQ ID NO: 7514 - DNA, 19 bp, Homo sapiens
gcccttccacccgtacaag

SEQ ID NO: 7515 - DNA, 19 bp, Homo sapiens
cccttccacccgtacaagc

SEQ ID NO: 7516 - DNA, 19 bp, Homo sapiens
ccttccacccgtacaagcg

SEQ ID NO: 7517 - DNA, 19 bp, Homo sapiens
cttccacccgtacaagcgg

SEQ ID NO: 7518 - DNA, 19 bp, Homo sapiens
ttccacccgtacaagcggc

SEQ ID NO: 7519 - DNA, 19 bp, Homo sapiens
tccacccgtacaagcggcc

SEQ ID NO: 7520 - DNA, 19 bp, Homo sapiens
ccacccgtacaagcggcct

SEQ ID NO: 7521 - DNA, 19 bp, Homo sapiens
cacccgtacaagcggcctt

SEQ ID NO: 7522 - DNA, 19 bp, Homo sapiens
acccgtacaagcggccttt

SEQ ID NO: 7523 - DNA, 19 bp, Homo sapiens
cccgtacaagcggcctttc

SEQ ID NO: 7524 - DNA, 19 bp, Homo sapiens
ccgtacaagcggcctttcc

SEQ ID NO: 7525 - DNA, 19 bp, Homo sapiens
cgtacaagcggcctttcca

SEQ ID NO: 7526 - DNA, 19 bp, Homo sapiens
gtacaagcggcctttccat

SEQ ID NO: 7527 - DNA, 19 bp, Homo sapiens
tacaagcggcctttccatg

SEQ ID NO: 7528 - DNA, 19 bp, Homo sapiens
acaagcggcctttccatga

SEQ ID NO: 7529 - DNA, 19 bp, Homo sapiens
caagcggcctttccatgag

SEQ ID NO: 7530 - DNA, 19 bp, Homo sapiens
aagcggcctttccatgagg

SEQ ID NO: 7531 - DNA, 19 bp, Homo sapiens
agcggcctttccatgagga

SEQ ID NO: 7532 - DNA, 19 bp, Homo sapiens
gcggcctttccatgaggac

SEQ ID NO: 7533 - DNA, 19 bp, Homo sapiens
cggcctttccatgaggacg

SEQ ID NO: 7534 - DNA, 19 bp, Homo sapiens
ggcctttccatgaggacgt

SEQ ID NO: 7535 - DNA, 19 bp, Homo sapiens
gcctttccatgaggacgtc

SEQ ID NO: 7536 - DNA, 19 bp, Homo sapiens
cctttccatgaggacgtct

SEQ ID NO: 7537 - DNA, 19 bp, Homo sapiens
ctttccatgaggacgtctt

SEQ ID NO: 7538 - DNA, 19 bp, Homo sapiens
tttccatgaggacgtcttc

SEQ ID NO: 7539 - DNA, 19 bp, Homo sapiens
ttccatgaggacgtcttcc

SEQ ID NO: 7540 - DNA, 19 bp, Homo sapiens
tccatgaggacgtcttccc

SEQ ID NO: 7541 - DNA, 19 bp, Homo sapiens
ccatgaggacgtcttccca

SEQ ID NO: 7542 - DNA, 19 bp, Homo sapiens
catgaggacgtcttcccag

SEQ ID NO: 7543 - DNA, 19 bp, Homo sapiens
atgaggacgtcttcccaga

SEQ ID NO: 7544 - DNA, 19 bp, Homo sapiens
tgaggacgtcttcccagag

SEQ ID NO: 7545 - DNA, 19 bp, Homo sapiens
gaggacgtcttcccagagg

SEQ ID NO: 7546 - DNA, 19 bp, Homo sapiens
aggacgtcttcccagaggc

SEQ ID NO: 7547 - DNA, 19 bp, Homo sapiens
ggacgtcttcccagaggcc

SEQ ID NO: 7548 - DNA, 19 bp, Homo sapiens
gacgtcttcccagaggccg

SEQ ID NO: 7549 - DNA, 19 bp, Homo sapiens
acgtcttcccagaggccga

SEQ ID NO: 7550 - DNA, 19 bp, Homo sapiens
cgtcttcccagaggccgag

SEQ ID NO: 7551 - DNA, 19 bp, Homo sapiens
gtcttcccagaggccgaga

SEQ ID NO: 7552 - DNA, 19 bp, Homo sapiens
tcttcccagaggccgagac

SEQ ID NO: 7553 - DNA, 19 bp, Homo sapiens
cttcccagaggccgagacc

SEQ ID NO: 7554 - DNA, 19 bp, Homo sapiens
ttcccagaggccgagacca

SEQ ID NO: 7555 - DNA, 19 bp, Homo sapiens
tcccagaggccgagaccac

SEQ ID NO: 7556 - DNA, 19 bp, Homo sapiens
cccagaggccgagaccacc

SEQ ID NO: 7557 - DNA, 19 bp, Homo sapiens
ccagaggccgagaccaccc

SEQ ID NO: 7558 - DNA, 19 bp, Homo sapiens
cagaggccgagaccaccct

SEQ ID NO: 7559 - DNA, 19 bp, Homo sapiens
agaggccgagaccaccctg

SEQ ID NO: 7560 - DNA, 19 bp, Homo sapiens
gaggccgagaccaccctgg

SEQ ID NO: 7561 - DNA, 19 bp, Homo sapiens
aggccgagaccaccctggc

SEQ ID NO: 7562 - DNA, 19 bp, Homo sapiens
ggccgagaccaccctggcc

SEQ ID NO: 7563 - DNA, 19 bp, Homo sapiens
gccgagaccaccctggccc

SEQ ID NO: 7564 - DNA, 19 bp, Homo sapiens
ccgagaccaccctggccct

SEQ ID NO: 7565 - DNA, 19 bp, Homo sapiens
cgagaccaccctggccctc

SEQ ID NO: 7566 - DNA, 19 bp, Homo sapiens
gagaccaccctggccctca

SEQ ID NO: 7567 - DNA, 19 bp, Homo sapiens
agaccaccctggccctcaa

SEQ ID NO: 7568 - DNA, 19 bp, Homo sapiens
gaccaccctggccctcaaa

SEQ ID NO: 7569 - DNA, 19 bp, Homo sapiens
accaccctggccctcaaag

SEQ ID NO: 7570 - DNA, 19 bp, Homo sapiens
ccaccctggccctcaaagg

SEQ ID NO: 7571 - DNA, 19 bp, Homo sapiens
caccctggccctcaaagga

SEQ ID NO: 7572 - DNA, 19 bp, Homo sapiens
accctggccctcaaaggac

SEQ ID NO: 7573 - DNA, 19 bp, Homo sapiens
ccctggccctcaaaggaca

SEQ ID NO: 7574 - DNA, 19 bp, Homo sapiens
cctggccctcaaaggacac

SEQ ID NO: 7575 - DNA, 19 bp, Homo sapiens
ctggccctcaaaggacact

SEQ ID NO: 7576 - DNA, 19 bp, Homo sapiens
tggccctcaaaggacactc

SEQ ID NO: 7577 - DNA, 19 bp, Homo sapiens
ggccctcaaaggacactcc

SEQ ID NO: 7578 - DNA, 19 bp, Homo sapiens
gccctcaaaggacactcct

SEQ ID NO: 7579 - DNA, 19 bp, Homo sapiens
ccctcaaaggacactcctt

SEQ ID NO: 7580 - DNA, 19 bp, Homo sapiens
cctcaaaggacactccttt

SEQ ID NO: 7581 - DNA, 19 bp, Homo sapiens
ctcaaaggacactccttta

SEQ ID NO: 7582 - DNA, 19 bp, Homo sapiens
tcaaaggacactcctttaa

SEQ ID NO: 7583 - DNA, 19 bp, Homo sapiens
caaaggacactcctttaag

SEQ ID NO: 7584 - DNA, 19 bp, Homo sapiens
aaaggacactcctttaaga

SEQ ID NO: 7585 - DNA, 19 bp, Homo sapiens
aaggacactcctttaagac

SEQ ID NO: 7586 - DNA, 19 bp, Homo sapiens
aggacactcctttaagacc

SEQ ID NO: 7587 - DNA, 19 bp, Homo sapiens
ggacactcctttaagaccc

SEQ ID NO: 7588 - DNA, 19 bp, Homo sapiens
gacactcctttaagacccc

SEQ ID NO: 7589 - DNA, 19 bp, Homo sapiens
acactcctttaagacccca

SEQ ID NO: 7590 - DNA, 19 bp, Homo sapiens
cactcctttaagaccccag

SEQ ID NO: 7591 - DNA, 19 bp, Homo sapiens
actcctttaagaccccagg

SEQ ID NO: 7592 - DNA, 19 bp, Homo sapiens
ctcctttaagaccccaggg

SEQ ID NO: 7593 - DNA, 19 bp, Homo sapiens
tcctttaagaccccagggc

SEQ ID NO: 7594 - DNA, 19 bp, Homo sapiens
cctttaagaccccagggcc

SEQ ID NO: 7595 - DNA, 19 bp, Homo sapiens
ctttaagaccccagggccg

SEQ ID NO: 7596 - DNA, 19 bp, Homo sapiens
tttaagaccccagggccgc

SEQ ID NO: 7597 - DNA, 19 bp, Homo sapiens
ttaagaccccagggccgct

SEQ ID NO: 7598 - DNA, 19 bp, Homo sapiens
taagaccccagggccgctg

SEQ ID NO: 7599 - DNA, 19 bp, Homo sapiens
aagaccccagggccgctgg

SEQ ID NO: 7600 - DNA, 19 bp, Homo sapiens
agaccccagggccgctgga

SEQ ID NO: 7601 - DNA, 19 bp, Homo sapiens
gaccccagggccgctggag

SEQ ID NO: 7602 - DNA, 19 bp, Homo sapiens
accccagggccgctggagg

SEQ ID NO: 7603 - DNA, 19 bp, Homo sapiens
ccccagggccgctggaggc

SEQ ID NO: 7604 - DNA, 19 bp, Homo sapiens
cccagggccgctggaggcc

SEQ ID NO: 7605 - DNA, 19 bp, Homo sapiens
ccagggccgctggaggcct

SEQ ID NO: 7606 - DNA, 19 bp, Homo sapiens
cagggccgctggaggcctt

SEQ ID NO: 7607 - DNA, 19 bp, Homo sapiens
agggccgctggaggccttc

SEQ ID NO: 7608 - DNA, 19 bp, Homo sapiens
gggccgctggaggccttcg

SEQ ID NO: 7609 - DNA, 19 bp, Homo sapiens
ggccgctggaggccttcga

SEQ ID NO: 7610 - DNA, 19 bp, Homo sapiens
gccgctggaggccttcgag

SEQ ID NO: 7611 - DNA, 19 bp, Homo sapiens
ccgctggaggccttcgagg

SEQ ID NO: 7612 - DNA, 19 bp, Homo sapiens
cgctggaggccttcgagga

SEQ ID NO: 7613 - DNA, 19 bp, Homo sapiens
gctggaggccttcgaggag

SEQ ID NO: 7614 - DNA, 19 bp, Homo sapiens
ctggaggccttcgaggaga

SEQ ID NO: 7615 - DNA, 19 bp, Homo sapiens
tggaggccttcgaggagat

SEQ ID NO: 7616 - DNA, 19 bp, Homo sapiens
ggaggccttcgaggagatc

SEQ ID NO: 7617 - DNA, 19 bp, Homo sapiens
gaggccttcgaggagatcc

SEQ ID NO: 7618 - DNA, 19 bp, Homo sapiens
aggccttcgaggagatccc

SEQ ID NO: 7619 - DNA, 19 bp, Homo sapiens
ggccttcgaggagatccca

SEQ ID NO: 7620 - DNA, 19 bp, Homo sapiens
gccttcgaggagatcccag

SEQ ID NO: 7621 - DNA, 19 bp, Homo sapiens
ccttcgaggagatcccagt

SEQ ID NO: 7622 - DNA, 19 bp, Homo sapiens
cttcgaggagatcccagtg

SEQ ID NO: 7623 - DNA, 19 bp, Homo sapiens
ttcgaggagatcccagtgg

SEQ ID NO: 7624 - DNA, 19 bp, Homo sapiens
tcgaggagatcccagtgga

SEQ ID NO: 7625 - DNA, 19 bp, Homo sapiens
cgaggagatcccagtggac

SEQ ID NO: 7626 - DNA, 19 bp, Homo sapiens
gaggagatcccagtggacg

SEQ ID NO: 7627 - DNA, 19 bp, Homo sapiens
aggagatcccagtggacgt

SEQ ID NO: 7628 - DNA, 19 bp, Homo sapiens
ggagatcccagtggacgtg

SEQ ID NO: 7629 - DNA, 19 bp, Homo sapiens
gagatcccagtggacgtgg

SEQ ID NO: 7630 - DNA, 19 bp, Homo sapiens
agatcccagtggacgtggc

SEQ ID NO: 7631 - DNA, 19 bp, Homo sapiens
gatcccagtggacgtggcg

SEQ ID NO: 7632 - DNA, 19 bp, Homo sapiens
atcccagtggacgtggcgg

SEQ ID NO: 7633 - DNA, 19 bp, Homo sapiens
tcccagtggacgtggcgga

SEQ ID NO: 7634 - DNA, 19 bp, Homo sapiens
cccagtggacgtggcggag

SEQ ID NO: 7635 - DNA, 19 bp, Homo sapiens
ccagtggacgtggcggagg

SEQ ID NO: 7636 - DNA, 19 bp, Homo sapiens
cagtggacgtggcggaggc

SEQ ID NO: 7637 - DNA, 19 bp, Homo sapiens
agtggacgtggcggaggcc

SEQ ID NO: 7638 - DNA, 19 bp, Homo sapiens
gtggacgtggcggaggccg

SEQ ID NO: 7639 - DNA, 19 bp, Homo sapiens
tggacgtggcggaggccga

SEQ ID NO: 7640 - DNA, 19 bp, Homo sapiens
ggacgtggcggaggccgag

SEQ ID NO: 7641 - DNA, 19 bp, Homo sapiens
gacgtggcggaggccgagg

SEQ ID NO: 7642 - DNA, 19 bp, Homo sapiens
acgtggcggaggccgaggc

SEQ ID NO: 7643 - DNA, 19 bp, Homo sapiens
cgtggcggaggccgaggcc

SEQ ID NO: 7644 - DNA, 19 bp, Homo sapiens
gtggcggaggccgaggcct

SEQ ID NO: 7645 - DNA, 19 bp, Homo sapiens
tggcggaggccgaggcctt

SEQ ID NO: 7646 - DNA, 19 bp, Homo sapiens
ggcggaggccgaggccttc

SEQ ID NO: 7647 - DNA, 19 bp, Homo sapiens
gcggaggccgaggccttcc

SEQ ID NO: 7648 - DNA, 19 bp, Homo sapiens
cggaggccgaggccttcct

SEQ ID NO: 7649 - DNA, 19 bp, Homo sapiens
ggaggccgaggccttcctg

SEQ ID NO: 7650 - DNA, 19 bp, Homo sapiens
gaggccgaggccttcctgc

SEQ ID NO: 7651 - DNA, 19 bp, Homo sapiens
aggccgaggccttcctgcc

SEQ ID NO: 7652 - DNA, 19 bp, Homo sapiens
ggccgaggccttcctgcct

SEQ ID NO: 7653 - DNA, 19 bp, Homo sapiens
gccgaggccttcctgcctg

SEQ ID NO: 7654 - DNA, 19 bp, Homo sapiens
ccgaggccttcctgcctgg

SEQ ID NO: 7655 - DNA, 19 bp, Homo sapiens
cgaggccttcctgcctggc

SEQ ID NO: 7656 - DNA, 19 bp, Homo sapiens
gaggccttcctgcctggct

SEQ ID NO: 7657 - DNA, 19 bp, Homo sapiens
aggccttcctgcctggctt

SEQ ID NO: 7658 - DNA, 19 bp, Homo sapiens
ggccttcctgcctggcttc

SEQ ID NO: 7659 - DNA, 19 bp, Homo sapiens
gccttcctgcctggcttct

SEQ ID NO: 7660 - DNA, 19 bp, Homo sapiens
ccttcctgcctggcttctc

SEQ ID NO: 7661 - DNA, 19 bp, Homo sapiens
cttcctgcctggcttctca

SEQ ID NO: 7662 - DNA, 19 bp, Homo sapiens
ttcctgcctggcttctcag

SEQ ID NO: 7663 - DNA, 19 bp, Homo sapiens
tcctgcctggcttctcagc

SEQ ID NO: 7664 - DNA, 19 bp, Homo sapiens
cctgcctggcttctcagca

SEQ ID NO: 7665 - DNA, 19 bp, Homo sapiens
ctgcctggcttctcagcag

SEQ ID NO: 7666 - DNA, 19 bp, Homo sapiens
tgcctggcttctcagcaga

SEQ ID NO: 7667 - DNA, 19 bp, Homo sapiens
gcctggcttctcagcagag

SEQ ID NO: 7668 - DNA, 19 bp, Homo sapiens
cctggcttctcagcagagg

SEQ ID NO: 7669 - DNA, 19 bp, Homo sapiens
ctggcttctcagcagaggc

SEQ ID NO: 7670 - DNA, 19 bp, Homo sapiens
tggcttctcagcagaggcc

SEQ ID NO: 7671 - DNA, 19 bp, Homo sapiens
ggcttctcagcagaggcct

SEQ ID NO: 7672 - DNA, 19 bp, Homo sapiens
gcttctcagcagaggcctg

SEQ ID NO: 7673 - DNA, 19 bp, Homo sapiens
cttctcagcagaggcctgg

SEQ ID NO: 7674 - DNA, 19 bp, Homo sapiens
ttctcagcagaggcctggt

SEQ ID NO: 7675 - DNA, 19 bp, Homo sapiens
tctcagcagaggcctggtg

SEQ ID NO: 7676 - DNA, 19 bp, Homo sapiens
ctcagcagaggcctggtgt

SEQ ID NO: 7677 - DNA, 19 bp, Homo sapiens
tcagcagaggcctggtgta

SEQ ID NO: 7678 - DNA, 19 bp, Homo sapiens
cagcagaggcctggtgtaa

SEQ ID NO: 7679 - DNA, 19 bp, Homo sapiens
agcagaggcctggtgtaac

SEQ ID NO: 7680 - DNA, 19 bp, Homo sapiens
gcagaggcctggtgtaacg

SEQ ID NO: 7681 - DNA, 19 bp, Homo sapiens
cagaggcctggtgtaacgg

SEQ ID NO: 7682 - DNA, 19 bp, Homo sapiens
agaggcctggtgtaacggg

SEQ ID NO: 7683 - DNA, 19 bp, Homo sapiens
gaggcctggtgtaacgggc

SEQ ID NO: 7684 - DNA, 19 bp, Homo sapiens
aggcctggtgtaacgggct

SEQ ID NO: 7685 - DNA, 19 bp, Homo sapiens
ggcctggtgtaacgggctc

SEQ ID NO: 7686 - DNA, 19 bp, Homo sapiens
gcctggtgtaacgggctcc

SEQ ID NO: 7687 - DNA, 19 bp, Homo sapiens
cctggtgtaacgggctccc

SEQ ID NO: 7688 - DNA, 19 bp, Homo sapiens
ctggtgtaacgggctcccc

SEQ ID NO: 7689 - DNA, 19 bp, Homo sapiens
tggtgtaacgggctcccct

SEQ ID NO: 7690 - DNA, 19 bp, Homo sapiens
ggtgtaacgggctccccta

SEQ ID NO: 7691 - DNA, 19 bp, Homo sapiens
gtgtaacgggctcccctac

SEQ ID NO: 7692 - DNA, 19 bp, Homo sapiens
tgtaacgggctcccctacc

SEQ ID NO: 7693 - DNA, 19 bp, Homo sapiens
gtaacgggctcccctaccc

SEQ ID NO: 7694 - DNA, 19 bp, Homo sapiens
taacgggctcccctacccc

SEQ ID NO: 7695 - DNA, 19 bp, Homo sapiens
aacgggctcccctacccca

SEQ ID NO: 7696 - DNA, 19 bp, Homo sapiens
acgggctcccctaccccag

SEQ ID NO: 7697 - DNA, 19 bp, Homo sapiens
cgggctcccctaccccagc

SEQ ID NO: 7698 - DNA, 19 bp, Homo sapiens
gggctcccctaccccagcc

SEQ ID NO: 7699 - DNA, 19 bp, Homo sapiens
ggctcccctaccccagcca

SEQ ID NO: 7700 - DNA, 19 bp, Homo sapiens
gctcccctaccccagccag

SEQ ID NO: 7701 - DNA, 19 bp, Homo sapiens
ctcccctaccccagccagg

SEQ ID NO: 7702 - DNA, 19 bp, Homo sapiens
tcccctaccccagccagga

SEQ ID NO: 7703 - DNA, 19 bp, Homo sapiens
cccctaccccagccaggag

SEQ ID NO: 7704 - DNA, 19 bp, Homo sapiens
ccctaccccagccaggagc

SEQ ID NO: 7705 - DNA, 19 bp, Homo sapiens
cctaccccagccaggagca

SEQ ID NO: 7706 - DNA, 19 bp, Homo sapiens
ctaccccagccaggagcat

SEQ ID NO: 7707 - DNA, 19 bp, Homo sapiens
taccccagccaggagcatg

SEQ ID NO: 7708 - DNA, 19 bp, Homo sapiens
accccagccaggagcatgg

SEQ ID NO: 7709 - DNA, 19 bp, Homo sapiens
ccccagccaggagcatggc

SEQ ID NO: 7710 - DNA, 19 bp, Homo sapiens
cccagccaggagcatggcc

SEQ ID NO: 7711 - DNA, 19 bp, Homo sapiens
ccagccaggagcatggccc

SEQ ID NO: 7712 - DNA, 19 bp, Homo sapiens
cagccaggagcatggcccc

SEQ ID NO: 7713 - DNA, 19 bp, Homo sapiens
agccaggagcatggccccc

SEQ ID NO: 7714 - DNA, 19 bp, Homo sapiens
gccaggagcatggccccca

SEQ ID NO: 7715 - DNA, 19 bp, Homo sapiens
ccaggagcatggcccccaa

SEQ ID NO: 7716 - DNA, 19 bp, Homo sapiens
caggagcatggcccccaag

SEQ ID NO: 7717 - DNA, 19 bp, Homo sapiens
aggagcatggcccccaagt

SEQ ID NO: 7718 - DNA, 19 bp, Homo sapiens
ggagcatggcccccaagtc

SEQ ID NO: 7719 - DNA, 19 bp, Homo sapiens
gagcatggcccccaagtcc

SEQ ID NO: 7720 - DNA, 19 bp, Homo sapiens
agcatggcccccaagtcct

SEQ ID NO: 7721 - DNA, 19 bp, Homo sapiens
gcatggcccccaagtcctg

SEQ ID NO: 7722 - DNA, 19 bp, Homo sapiens
catggcccccaagtcctgg

SEQ ID NO: 7723 - DNA, 19 bp, Homo sapiens
atggcccccaagtcctggg

SEQ ID NO: 7724 - DNA, 19 bp, Homo sapiens
tggcccccaagtcctgggt

SEQ ID NO: 7725 - DNA, 19 bp, Homo sapiens
ggcccccaagtcctgggtt

SEQ ID NO: 7726 - DNA, 19 bp, Homo sapiens
gcccccaagtcctgggttc

SEQ ID NO: 7727 - DNA, 19 bp, Homo sapiens
cccccaagtcctgggttca

SEQ ID NO: 7728 - DNA, 19 bp, Homo sapiens
ccccaagtcctgggttcag

SEQ ID NO: 7729 - DNA, 19 bp, Homo sapiens
cccaagtcctgggttcaga

SEQ ID NO: 7730 - DNA, 19 bp, Homo sapiens
ccaagtcctgggttcagag

SEQ ID NO: 7731 - DNA, 19 bp, Homo sapiens
caagtcctgggttcagagg

SEQ ID NO: 7732 - DNA, 19 bp, Homo sapiens
aagtcctgggttcagaggt

SEQ ID NO: 7733 - DNA, 19 bp, Homo sapiens
agtcctgggttcagaggtc

SEQ ID NO: 7734 - DNA, 19 bp, Homo sapiens
gtcctgggttcagaggtca

SEQ ID NO: 7735 - DNA, 19 bp, Homo sapiens
tcctgggttcagaggtcaa

SEQ ID NO: 7736 - DNA, 19 bp, Homo sapiens
cctgggttcagaggtcaaa

SEQ ID NO: 7737 - DNA, 19 bp, Homo sapiens
ctgggttcagaggtcaaag

SEQ ID NO: 7738 - DNA, 19 bp, Homo sapiens
tgggttcagaggtcaaagt

SEQ ID NO: 7739 - DNA, 19 bp, Homo sapiens
gggttcagaggtcaaagtc

SEQ ID NO: 7740 - DNA, 19 bp, Homo sapiens
ggttcagaggtcaaagtca

SEQ ID NO: 7741 - DNA, 19 bp, Homo sapiens
gttcagaggtcaaagtcaa

SEQ ID NO: 7742 - DNA, 19 bp, Homo sapiens
ttcagaggtcaaagtcaag

SEQ ID NO: 7743 - DNA, 19 bp, Homo sapiens
tcagaggtcaaagtcaagc

SEQ ID NO: 7744 - DNA, 19 bp, Homo sapiens
cagaggtcaaagtcaagcc

SEQ ID NO: 7745 - DNA, 19 bp, Homo sapiens
agaggtcaaagtcaagccc

SEQ ID NO: 7746 - DNA, 19 bp, Homo sapiens
gaggtcaaagtcaagcccc

SEQ ID NO: 7747 - DNA, 19 bp, Homo sapiens
aggtcaaagtcaagccccc

SEQ ID NO: 7748 - DNA, 19 bp, Homo sapiens
ggtcaaagtcaagccccca

SEQ ID NO: 7749 - DNA, 19 bp, Homo sapiens
gtcaaagtcaagcccccag

SEQ ID NO: 7750 - DNA, 19 bp, Homo sapiens
tcaaagtcaagcccccagt

SEQ ID NO: 7751 - DNA, 19 bp, Homo sapiens
caaagtcaagcccccagtt

SEQ ID NO: 7752 - DNA, 19 bp, Homo sapiens
aaagtcaagcccccagttc

SEQ ID NO: 7753 - DNA, 19 bp, Homo sapiens
aagtcaagcccccagttct

SEQ ID NO: 7754 - DNA, 19 bp, Homo sapiens
agtcaagcccccagttctg

SEQ ID NO: 7755 - DNA, 19 bp, Homo sapiens
gtcaagcccccagttctgg

SEQ ID NO: 7756 - DNA, 19 bp, Homo sapiens
tcaagcccccagttctgga

SEQ ID NO: 7757 - DNA, 19 bp, Homo sapiens
caagcccccagttctggag

SEQ ID NO: 7758 - DNA, 19 bp, Homo sapiens
aagcccccagttctggaga

SEQ ID NO: 7759 - DNA, 19 bp, Homo sapiens
agcccccagttctggagag

SEQ ID NO: 7760 - DNA, 19 bp, Homo sapiens
gcccccagttctggagagt

SEQ ID NO: 7761 - DNA, 19 bp, Homo sapiens
cccccagttctggagagtg

SEQ ID NO: 7762 - DNA, 19 bp, Homo sapiens
ccccagttctggagagtgg

SEQ ID NO: 7763 - DNA, 19 bp, Homo sapiens
cccagttctggagagtggt

SEQ ID NO: 7764 - DNA, 19 bp, Homo sapiens
ccagttctggagagtggtg

SEQ ID NO: 7765 - DNA, 19 bp, Homo sapiens
cagttctggagagtggtgc

SEQ ID NO: 7766 - DNA, 19 bp, Homo sapiens
agttctggagagtggtgct

SEQ ID NO: 7767 - DNA, 19 bp, Homo sapiens
gttctggagagtggtgctg

SEQ ID NO: 7768 - DNA, 19 bp, Homo sapiens
ttctggagagtggtgctgg

SEQ ID NO: 7769 - DNA, 19 bp, Homo sapiens
tctggagagtggtgctggg

SEQ ID NO: 7770 - DNA, 19 bp, Homo sapiens
ctggagagtggtgctggga

SEQ ID NO: 7771 - DNA, 19 bp, Homo sapiens
tggagagtggtgctgggat

SEQ ID NO: 7772 - DNA, 19 bp, Homo sapiens
ggagagtggtgctgggatg

SEQ ID NO: 7773 - DNA, 19 bp, Homo sapiens
gagagtggtgctgggatgt

SEQ ID NO: 7774 - DNA, 19 bp, Homo sapiens
agagtggtgctgggatgtt

SEQ ID NO: 7775 - DNA, 19 bp, Homo sapiens
gagtggtgctgggatgttc

SEQ ID NO: 7776 - DNA, 19 bp, Homo sapiens
agtggtgctgggatgttct

SEQ ID NO: 7777 - DNA, 19 bp, Homo sapiens
gtggtgctgggatgttctg

SEQ ID NO: 7778 - DNA, 19 bp, Homo sapiens
tggtgctgggatgttctgc

SEQ ID NO: 7779 - DNA, 19 bp, Homo sapiens
ggtgctgggatgttctgct

SEQ ID NO: 7780 - DNA, 19 bp, Homo sapiens
gtgctgggatgttctgcta

SEQ ID NO: 7781 - DNA, 19 bp, Homo sapiens
tgctgggatgttctgctac

SEQ ID NO: 7782 - DNA, 19 bp, Homo sapiens
gctgggatgttctgctacc

SEQ ID NO: 7783 - DNA, 19 bp, Homo sapiens
ctgggatgttctgctacca

SEQ ID NO: 7784 - DNA, 19 bp, Homo sapiens
tgggatgttctgctaccag

SEQ ID NO: 7785 - DNA, 19 bp, Homo sapiens
gggatgttctgctaccagc

SEQ ID NO: 7786 - DNA, 19 bp, Homo sapiens
ggatgttctgctaccagcc

SEQ ID NO: 7787 - DNA, 19 bp, Homo sapiens
gatgttctgctaccagcct

SEQ ID NO: 7788 - DNA, 19 bp, Homo sapiens
atgttctgctaccagcctc

SEQ ID NO: 7789 - DNA, 19 bp, Homo sapiens
tgttctgctaccagcctcc

SEQ ID NO: 7790 - DNA, 19 bp, Homo sapiens
gttctgctaccagcctccc

SEQ ID NO: 7791 - DNA, 19 bp, Homo sapiens
ttctgctaccagcctccct

SEQ ID NO: 7792 - DNA, 19 bp, Homo sapiens
tctgctaccagcctccctt

SEQ ID NO: 7793 - DNA, 19 bp, Homo sapiens
ctgctaccagcctcccttg

SEQ ID NO: 7794 - DNA, 19 bp, Homo sapiens
tgctaccagcctcccttgc

SEQ ID NO: 7795 - DNA, 19 bp, Homo sapiens
gctaccagcctcccttgca

SEQ ID NO: 7796 - DNA, 19 bp, Homo sapiens
ctaccagcctcccttgcag

SEQ ID NO: 7797 - DNA, 19 bp, Homo sapiens
taccagcctcccttgcagc

SEQ ID NO: 7798 - DNA, 19 bp, Homo sapiens
accagcctcccttgcagca

SEQ ID NO: 7799 - DNA, 19 bp, Homo sapiens
ccagcctcccttgcagcat

SEQ ID NO: 7800 - DNA, 19 bp, Homo sapiens
cagcctcccttgcagcata

SEQ ID NO: 7801 - DNA, 19 bp, Homo sapiens
agcctcccttgcagcatat

SEQ ID NO: 7802 - DNA, 19 bp, Homo sapiens
gcctcccttgcagcatatg

SEQ ID NO: 7803 - DNA, 19 bp, Homo sapiens
cctcccttgcagcatatgt

SEQ ID NO: 7804 - DNA, 19 bp, Homo sapiens
ctcccttgcagcatatgta

SEQ ID NO: 7805 - DNA, 19 bp, Homo sapiens
tcccttgcagcatatgtac

SEQ ID NO: 7806 - DNA, 19 bp, Homo sapiens
cccttgcagcatatgtact

SEQ ID NO: 7807 - DNA, 19 bp, Homo sapiens
ccttgcagcatatgtactg

SEQ ID NO: 7808 - DNA, 19 bp, Homo sapiens
cttgcagcatatgtactgc

SEQ ID NO: 7809 - DNA, 19 bp, Homo sapiens
ttgcagcatatgtactgct

SEQ ID NO: 7810 - DNA, 19 bp, Homo sapiens
tgcagcatatgtactgctc

SEQ ID NO: 7811 - DNA, 19 bp, Homo sapiens
gcagcatatgtactgctcc

SEQ ID NO: 7812 - DNA, 19 bp, Homo sapiens
cagcatatgtactgctcct

SEQ ID NO: 7813 - DNA, 19 bp, Homo sapiens
agcatatgtactgctcctc

SEQ ID NO: 7814 - DNA, 19 bp, Homo sapiens
gcatatgtactgctcctcc

SEQ ID NO: 7815 - DNA, 19 bp, Homo sapiens
catatgtactgctcctccc

SEQ ID NO: 7816 - DNA, 19 bp, Homo sapiens
atatgtactgctcctccca

SEQ ID NO: 7817 - DNA, 19 bp, Homo sapiens
tatgtactgctcctcccag

SEQ ID NO: 7818 - DNA, 19 bp, Homo sapiens
atgtactgctcctcccagc

SEQ ID NO: 7819 - DNA, 19 bp, Homo sapiens
tgtactgctcctcccagcc

SEQ ID NO: 7820 - DNA, 19 bp, Homo sapiens
gtactgctcctcccagccc

SEQ ID NO: 7821 - DNA, 19 bp, Homo sapiens
tactgctcctcccagcccc

SEQ ID NO: 7822 - DNA, 19 bp, Homo sapiens
actgctcctcccagccccc

SEQ ID NO: 7823 - DNA, 19 bp, Homo sapiens
ctgctcctcccagcccccc

SEQ ID NO: 7824 - DNA, 19 bp, Homo sapiens
tgctcctcccagcccccct

SEQ ID NO: 7825 - DNA, 19 bp, Homo sapiens
gctcctcccagcccccctt

SEQ ID NO: 7826 - DNA, 19 bp, Homo sapiens
ctcctcccagccccccttc

SEQ ID NO: 7827 - DNA, 19 bp, Homo sapiens
tcctcccagccccccttcc

SEQ ID NO: 7828 - DNA, 19 bp, Homo sapiens
cctcccagccccccttcca

SEQ ID NO: 7829 - DNA, 19 bp, Homo sapiens
ctcccagccccccttccac

SEQ ID NO: 7830 - DNA, 19 bp, Homo sapiens
tcccagccccccttccacc

SEQ ID NO: 7831 - DNA, 19 bp, Homo sapiens
cccagccccccttccacca

SEQ ID NO: 7832 - DNA, 19 bp, Homo sapiens
ccagccccccttccaccag

SEQ ID NO: 7833 - DNA, 19 bp, Homo sapiens
cagccccccttccaccagt

SEQ ID NO: 7834 - DNA, 19 bp, Homo sapiens
agccccccttccaccagta

SEQ ID NO: 7835 - DNA, 19 bp, Homo sapiens
gccccccttccaccagtac

SEQ ID NO: 7836 - DNA, 19 bp, Homo sapiens
ccccccttccaccagtact

SEQ ID NO: 7837 - DNA, 19 bp, Homo sapiens
cccccttccaccagtactc

SEQ ID NO: 7838 - DNA, 19 bp, Homo sapiens
ccccttccaccagtactcg

SEQ ID NO: 7839 - DNA, 19 bp, Homo sapiens
cccttccaccagtactcgc

SEQ ID NO: 7840 - DNA, 19 bp, Homo sapiens
ccttccaccagtactcgcc

SEQ ID NO: 7841 - DNA, 19 bp, Homo sapiens
cttccaccagtactcgcca

SEQ ID NO: 7842 - DNA, 19 bp, Homo sapiens
ttccaccagtactcgccag

SEQ ID NO: 7843 - DNA, 19 bp, Homo sapiens
tccaccagtactcgccagg

SEQ ID NO: 7844 - DNA, 19 bp, Homo sapiens
ccaccagtactcgccaggt

SEQ ID NO: 7845 - DNA, 19 bp, Homo sapiens
caccagtactcgccaggtg

SEQ ID NO: 7846 - DNA, 19 bp, Homo sapiens
accagtactcgccaggtgg

SEQ ID NO: 7847 - DNA, 19 bp, Homo sapiens
ccagtactcgccaggtggt

SEQ ID NO: 7848 - DNA, 19 bp, Homo sapiens
cagtactcgccaggtggtg

SEQ ID NO: 7849 - DNA, 19 bp, Homo sapiens
agtactcgccaggtggtgg

SEQ ID NO: 7850 - DNA, 19 bp, Homo sapiens
gtactcgccaggtggtggc

SEQ ID NO: 7851 - DNA, 19 bp, Homo sapiens
tactcgccaggtggtggca

SEQ ID NO: 7852 - DNA, 19 bp, Homo sapiens
actcgccaggtggtggcag

SEQ ID NO: 7853 - DNA, 19 bp, Homo sapiens
ctcgccaggtggtggcagc

SEQ ID NO: 7854 - DNA, 19 bp, Homo sapiens
tcgccaggtggtggcagct

SEQ ID NO: 7855 - DNA, 19 bp, Homo sapiens
cgccaggtggtggcagcta

SEQ ID NO: 7856 - DNA, 19 bp, Homo sapiens
gccaggtggtggcagctac

SEQ ID NO: 7857 - DNA, 19 bp, Homo sapiens
ccaggtggtggcagctacc

SEQ ID NO: 7858 - DNA, 19 bp, Homo sapiens
caggtggtggcagctaccc

SEQ ID NO: 7859 - DNA, 19 bp, Homo sapiens
aggtggtggcagctacccc

SEQ ID NO: 7860 - DNA, 19 bp, Homo sapiens
ggtggtggcagctacccca

SEQ ID NO: 7861 - DNA, 19 bp, Homo sapiens
gtggtggcagctaccccat

SEQ ID NO: 7862 - DNA, 19 bp, Homo sapiens
tggtggcagctaccccata

SEQ ID NO: 7863 - DNA, 19 bp, Homo sapiens
ggtggcagctaccccatac

SEQ ID NO: 7864 - DNA, 19 bp, Homo sapiens
gtggcagctaccccatacc

SEQ ID NO: 7865 - DNA, 19 bp, Homo sapiens
tggcagctaccccataccc

SEQ ID NO: 7866 - DNA, 19 bp, Homo sapiens
ggcagctaccccataccct

SEQ ID NO: 7867 - DNA, 19 bp, Homo sapiens
gcagctaccccatacccta

SEQ ID NO: 7868 - DNA, 19 bp, Homo sapiens
cagctaccccataccctac

SEQ ID NO: 7869 - DNA, 19 bp, Homo sapiens
agctaccccataccctacc

SEQ ID NO: 7870 - DNA, 19 bp, Homo sapiens
gctaccccataccctacct

SEQ ID NO: 7871 - DNA, 19 bp, Homo sapiens
ctaccccataccctacctg

SEQ ID NO: 7872 - DNA, 19 bp, Homo sapiens
taccccataccctacctgg

SEQ ID NO: 7873 - DNA, 19 bp, Homo sapiens
accccataccctacctggg

SEQ ID NO: 7874 - DNA, 19 bp, Homo sapiens
ccccataccctacctgggc

SEQ ID NO: 7875 - DNA, 19 bp, Homo sapiens
cccataccctacctgggct

SEQ ID NO: 7876 - DNA, 19 bp, Homo sapiens
ccataccctacctgggctc

SEQ ID NO: 7877 - DNA, 19 bp, Homo sapiens
cataccctacctgggctcc

SEQ ID NO: 7878 - DNA, 19 bp, Homo sapiens
ataccctacctgggctcct

SEQ ID NO: 7879 - DNA, 19 bp, Homo sapiens
taccctacctgggctcctc

SEQ ID NO: 7880 - DNA, 19 bp, Homo sapiens
accctacctgggctcctca

SEQ ID NO: 7881 - DNA, 19 bp, Homo sapiens
ccctacctgggctcctcac

SEQ ID NO: 7882 - DNA, 19 bp, Homo sapiens
cctacctgggctcctcaca

SEQ ID NO: 7883 - DNA, 19 bp, Homo sapiens
ctacctgggctcctcacac

SEQ ID NO: 7884 - DNA, 19 bp, Homo sapiens
tacctgggctcctcacact

SEQ ID NO: 7885 - DNA, 19 bp, Homo sapiens
acctgggctcctcacacta

SEQ ID NO: 7886 - DNA, 19 bp, Homo sapiens
cctgggctcctcacactat

SEQ ID NO: 7887 - DNA, 19 bp, Homo sapiens
ctgggctcctcacactatc

SEQ ID NO: 7888 - DNA, 19 bp, Homo sapiens
tgggctcctcacactatca

SEQ ID NO: 7889 - DNA, 19 bp, Homo sapiens
gggctcctcacactatcag

SEQ ID NO: 7890 - DNA, 19 bp, Homo sapiens
ggctcctcacactatcagt

SEQ ID NO: 7891 - DNA, 19 bp, Homo sapiens
gctcctcacactatcagta

SEQ ID NO: 7892 - DNA, 19 bp, Homo sapiens
ctcctcacactatcagtac

SEQ ID NO: 7893 - DNA, 19 bp, Homo sapiens
tcctcacactatcagtacc

SEQ ID NO: 7894 - DNA, 19 bp, Homo sapiens
cctcacactatcagtacca

SEQ ID NO: 7895 - DNA, 19 bp, Homo sapiens
ctcacactatcagtaccag

SEQ ID NO: 7896 - DNA, 19 bp, Homo sapiens
tcacactatcagtaccagc

SEQ ID NO: 7897 - DNA, 19 bp, Homo sapiens
cacactatcagtaccagcg

SEQ ID NO: 7898 - DNA, 19 bp, Homo sapiens
acactatcagtaccagcga

SEQ ID NO: 7899 - DNA, 19 bp, Homo sapiens
cactatcagtaccagcgaa

SEQ ID NO: 7900 - DNA, 19 bp, Homo sapiens
actatcagtaccagcgaat

SEQ ID NO: 7901 - DNA, 19 bp, Homo sapiens
ctatcagtaccagcgaatg

SEQ ID NO: 7902 - DNA, 19 bp, Homo sapiens
tatcagtaccagcgaatgg

SEQ ID NO: 7903 - DNA, 19 bp, Homo sapiens
atcagtaccagcgaatggc

SEQ ID NO: 7904 - DNA, 19 bp, Homo sapiens
tcagtaccagcgaatggca

SEQ ID NO: 7905 - DNA, 19 bp, Homo sapiens
cagtaccagcgaatggcac

SEQ ID NO: 7906 - DNA, 19 bp, Homo sapiens
agtaccagcgaatggcacc

SEQ ID NO: 7907 - DNA, 19 bp, Homo sapiens
gtaccagcgaatggcaccc

SEQ ID NO: 7908 - DNA, 19 bp, Homo sapiens
taccagcgaatggcacccc

SEQ ID NO: 7909 - DNA, 19 bp, Homo sapiens
accagcgaatggcacccca

SEQ ID NO: 7910 - DNA, 19 bp, Homo sapiens
ccagcgaatggcaccccag

SEQ ID NO: 7911 - DNA, 19 bp, Homo sapiens
cagcgaatggcaccccagg

SEQ ID NO: 7912 - DNA, 19 bp, Homo sapiens
agcgaatggcaccccaggc

SEQ ID NO: 7913 - DNA, 19 bp, Homo sapiens
gcgaatggcaccccaggcc

SEQ ID NO: 7914 - DNA, 19 bp, Homo sapiens
cgaatggcaccccaggcca

SEQ ID NO: 7915 - DNA, 19 bp, Homo sapiens
gaatggcaccccaggccag

SEQ ID NO: 7916 - DNA, 19 bp, Homo sapiens
aatggcaccccaggccagc

SEQ ID NO: 7917 - DNA, 19 bp, Homo sapiens
atggcaccccaggccagca

SEQ ID NO: 7918 - DNA, 19 bp, Homo sapiens
tggcaccccaggccagcac

SEQ ID NO: 7919 - DNA, 19 bp, Homo sapiens
ggcaccccaggccagcacc

SEQ ID NO: 7920 - DNA, 19 bp, Homo sapiens
gcaccccaggccagcaccg

SEQ ID NO: 7921 - DNA, 19 bp, Homo sapiens
caccccaggccagcaccga

SEQ ID NO: 7922 - DNA, 19 bp, Homo sapiens
accccaggccagcaccgat

SEQ ID NO: 7923 - DNA, 19 bp, Homo sapiens
ccccaggccagcaccgatg

SEQ ID NO: 7924 - DNA, 19 bp, Homo sapiens
cccaggccagcaccgatgg

SEQ ID NO: 7925 - DNA, 19 bp, Homo sapiens
ccaggccagcaccgatggg

SEQ ID NO: 7926 - DNA, 19 bp, Homo sapiens
caggccagcaccgatgggc

SEQ ID NO: 7927 - DNA, 19 bp, Homo sapiens
aggccagcaccgatgggca

SEQ ID NO: 7928 - DNA, 19 bp, Homo sapiens
ggccagcaccgatgggcac

SEQ ID NO: 7929 - DNA, 19 bp, Homo sapiens
gccagcaccgatgggcacc

SEQ ID NO: 7930 - DNA, 19 bp, Homo sapiens
ccagcaccgatgggcacca

SEQ ID NO: 7931 - DNA, 19 bp, Homo sapiens
cagcaccgatgggcaccag

SEQ ID NO: 7932 - DNA, 19 bp, Homo sapiens
agcaccgatgggcaccagc

SEQ ID NO: 7933 - DNA, 19 bp, Homo sapiens
gcaccgatgggcaccagcc

SEQ ID NO: 7934 - DNA, 19 bp, Homo sapiens
caccgatgggcaccagcct

SEQ ID NO: 7935 - DNA, 19 bp, Homo sapiens
accgatgggcaccagcctc

SEQ ID NO: 7936 - DNA, 19 bp, Homo sapiens
ccgatgggcaccagcctct

SEQ ID NO: 7937 - DNA, 19 bp, Homo sapiens
cgatgggcaccagcctctc

SEQ ID NO: 7938 - DNA, 19 bp, Homo sapiens
gatgggcaccagcctctct

SEQ ID NO: 7939 - DNA, 19 bp, Homo sapiens
atgggcaccagcctctctt

SEQ ID NO: 7940 - DNA, 19 bp, Homo sapiens
tgggcaccagcctctcttc

SEQ ID NO: 7941 - DNA, 19 bp, Homo sapiens
gggcaccagcctctcttcc

SEQ ID NO: 7942 - DNA, 19 bp, Homo sapiens
ggcaccagcctctcttccc

SEQ ID NO: 7943 - DNA, 19 bp, Homo sapiens
gcaccagcctctcttccca

SEQ ID NO: 7944 - DNA, 19 bp, Homo sapiens
caccagcctctcttcccaa

SEQ ID NO: 7945 - DNA, 19 bp, Homo sapiens
accagcctctcttcccaaa

SEQ ID NO: 7946 - DNA, 19 bp, Homo sapiens
ccagcctctcttcccaaaa

SEQ ID NO: 7947 - DNA, 19 bp, Homo sapiens
cagcctctcttcccaaaac

SEQ ID NO: 7948 - DNA, 19 bp, Homo sapiens
agcctctcttcccaaaacc

SEQ ID NO: 7949 - DNA, 19 bp, Homo sapiens
gcctctcttcccaaaaccc

SEQ ID NO: 7950 - DNA, 19 bp, Homo sapiens
cctctcttcccaaaaccca

SEQ ID NO: 7951 - DNA, 19 bp, Homo sapiens
ctctcttcccaaaacccat

SEQ ID NO: 7952 - DNA, 19 bp, Homo sapiens
tctcttcccaaaacccatc

SEQ ID NO: 7953 - DNA, 19 bp, Homo sapiens
ctcttcccaaaacccatct

SEQ ID NO: 7954 - DNA, 19 bp, Homo sapiens
tcttcccaaaacccatcta

SEQ ID NO: 7955 - DNA, 19 bp, Homo sapiens
cttcccaaaacccatctat

SEQ ID NO: 7956 - DNA, 19 bp, Homo sapiens
ttcccaaaacccatctatt

SEQ ID NO: 7957 - DNA, 19 bp, Homo sapiens
tcccaaaacccatctattc

SEQ ID NO: 7958 - DNA, 19 bp, Homo sapiens
cccaaaacccatctattcc

SEQ ID NO: 7959 - DNA, 19 bp, Homo sapiens
ccaaaacccatctattcct

SEQ ID NO: 7960 - DNA, 19 bp, Homo sapiens
caaaacccatctattccta

SEQ ID NO: 7961 - DNA, 19 bp, Homo sapiens
aaaacccatctattcctac

SEQ ID NO: 7962 - DNA, 19 bp, Homo sapiens
aaacccatctattcctaca

SEQ ID NO: 7963 - DNA, 19 bp, Homo sapiens
aacccatctattcctacag

SEQ ID NO: 7964 - DNA, 19 bp, Homo sapiens
acccatctattcctacagc

SEQ ID NO: 7965 - DNA, 19 bp, Homo sapiens
cccatctattcctacagca

SEQ ID NO: 7966 - DNA, 19 bp, Homo sapiens
ccatctattcctacagcat

SEQ ID NO: 7967 - DNA, 19 bp, Homo sapiens
catctattcctacagcatc

SEQ ID NO: 7968 - DNA, 19 bp, Homo sapiens
atctattcctacagcatcc

SEQ ID NO: 7969 - DNA, 19 bp, Homo sapiens
tctattcctacagcatcct

SEQ ID NO: 7970 - DNA, 19 bp, Homo sapiens
ctattcctacagcatcctc

SEQ ID NO: 7971 - DNA, 19 bp, Homo sapiens
tattcctacagcatcctca

SEQ ID NO: 7972 - DNA, 19 bp, Homo sapiens
attcctacagcatcctcat

SEQ ID NO: 7973 - DNA, 19 bp, Homo sapiens
ttcctacagcatcctcatc

SEQ ID NO: 7974 - DNA, 19 bp, Homo sapiens
tcctacagcatcctcatct

SEQ ID NO: 7975 - DNA, 19 bp, Homo sapiens
cctacagcatcctcatctt

SEQ ID NO: 7976 - DNA, 19 bp, Homo sapiens
ctacagcatcctcatcttc

SEQ ID NO: 7977 - DNA, 19 bp, Homo sapiens
tacagcatcctcatcttca

SEQ ID NO: 7978 - DNA, 19 bp, Homo sapiens
acagcatcctcatcttcat

SEQ ID NO: 7979 - DNA, 19 bp, Homo sapiens
cagcatcctcatcttcatg

SEQ ID NO: 7980 - DNA, 19 bp, Homo sapiens
agcatcctcatcttcatgg

SEQ ID NO: 7981 - DNA, 19 bp, Homo sapiens
gcatcctcatcttcatggc

SEQ ID NO: 7982 - DNA, 19 bp, Homo sapiens
catcctcatcttcatggcc

SEQ ID NO: 7983 - DNA, 19 bp, Homo sapiens
atcctcatcttcatggccc

SEQ ID NO: 7984 - DNA, 19 bp, Homo sapiens
tcctcatcttcatggccct

SEQ ID NO: 7985 - DNA, 19 bp, Homo sapiens
cctcatcttcatggccctt

SEQ ID NO: 7986 - DNA, 19 bp, Homo sapiens
ctcatcttcatggccctta

SEQ ID NO: 7987 - DNA, 19 bp, Homo sapiens
tcatcttcatggcccttaa

SEQ ID NO: 7988 - DNA, 19 bp, Homo sapiens
catcttcatggcccttaag

SEQ ID NO: 7989 - DNA, 19 bp, Homo sapiens
atcttcatggcccttaaga

SEQ ID NO: 7990 - DNA, 19 bp, Homo sapiens
tcttcatggcccttaagaa

SEQ ID NO: 7991 - DNA, 19 bp, Homo sapiens
cttcatggcccttaagaac

SEQ ID NO: 7992 - DNA, 19 bp, Homo sapiens
ttcatggcccttaagaaca

SEQ ID NO: 7993 - DNA, 19 bp, Homo sapiens
tcatggcccttaagaacag

SEQ ID NO: 7994 - DNA, 19 bp, Homo sapiens
catggcccttaagaacagt

SEQ ID NO: 7995 - DNA, 19 bp, Homo sapiens
atggcccttaagaacagta

SEQ ID NO: 7996 - DNA, 19 bp, Homo sapiens
tggcccttaagaacagtaa

SEQ ID NO: 7997 - DNA, 19 bp, Homo sapiens
ggcccttaagaacagtaaa

SEQ ID NO: 7998 - DNA, 19 bp, Homo sapiens
gcccttaagaacagtaaaa

SEQ ID NO: 7999 - DNA, 19 bp, Homo sapiens
cccttaagaacagtaaaac

SEQ ID NO: 8000 - DNA, 19 bp, Homo sapiens
ccttaagaacagtaaaact

SEQ ID NO: 8001 - DNA, 19 bp, Homo sapiens
cttaagaacagtaaaactg

SEQ ID NO: 8002 - DNA, 19 bp, Homo sapiens
ttaagaacagtaaaactgg

SEQ ID NO: 8003 - DNA, 19 bp, Homo sapiens
taagaacagtaaaactggg

SEQ ID NO: 8004 - DNA, 19 bp, Homo sapiens
aagaacagtaaaactggga

SEQ ID NO: 8005 - DNA, 19 bp, Homo sapiens
agaacagtaaaactgggag

SEQ ID NO: 8006 - DNA, 19 bp, Homo sapiens
gaacagtaaaactgggagc

SEQ ID NO: 8007 - DNA, 19 bp, Homo sapiens
aacagtaaaactgggagcc

SEQ ID NO: 8008 - DNA, 19 bp, Homo sapiens
acagtaaaactgggagcct

SEQ ID NO: 8009 - DNA, 19 bp, Homo sapiens
cagtaaaactgggagcctt

SEQ ID NO: 8010 - DNA, 19 bp, Homo sapiens
agtaaaactgggagccttc

SEQ ID NO: 8011 - DNA, 19 bp, Homo sapiens
gtaaaactgggagccttcc

SEQ ID NO: 8012 - DNA, 19 bp, Homo sapiens
taaaactgggagccttccc

SEQ ID NO: 8013 - DNA, 19 bp, Homo sapiens
aaaactgggagccttcccg

SEQ ID NO: 8014 - DNA, 19 bp, Homo sapiens
aaactgggagccttcccgt

SEQ ID NO: 8015 - DNA, 19 bp, Homo sapiens
aactgggagccttcccgtc

SEQ ID NO: 8016 - DNA, 19 bp, Homo sapiens
actgggagccttcccgtca

SEQ ID NO: 8017 - DNA, 19 bp, Homo sapiens
ctgggagccttcccgtcag

SEQ ID NO: 8018 - DNA, 19 bp, Homo sapiens
tgggagccttcccgtcagc

SEQ ID NO: 8019 - DNA, 19 bp, Homo sapiens
gggagccttcccgtcagcg

SEQ ID NO: 8020 - DNA, 19 bp, Homo sapiens
ggagccttcccgtcagcga

SEQ ID NO: 8021 - DNA, 19 bp, Homo sapiens
gagccttcccgtcagcgag

SEQ ID NO: 8022 - DNA, 19 bp, Homo sapiens
agccttcccgtcagcgaga

SEQ ID NO: 8023 - DNA, 19 bp, Homo sapiens
gccttcccgtcagcgagat

SEQ ID NO: 8024 - DNA, 19 bp, Homo sapiens
ccttcccgtcagcgagatc

SEQ ID NO: 8025 - DNA, 19 bp, Homo sapiens
cttcccgtcagcgagatct

SEQ ID NO: 8026 - DNA, 19 bp, Homo sapiens
ttcccgtcagcgagatcta

SEQ ID NO: 8027 - DNA, 19 bp, Homo sapiens
tcccgtcagcgagatctac

SEQ ID NO: 8028 - DNA, 19 bp, Homo sapiens
cccgtcagcgagatctaca

SEQ ID NO: 8029 - DNA, 19 bp, Homo sapiens
ccgtcagcgagatctacaa

SEQ ID NO: 8030 - DNA, 19 bp, Homo sapiens
cgtcagcgagatctacaat

SEQ ID NO: 8031 - DNA, 19 bp, Homo sapiens
gtcagcgagatctacaatt

SEQ ID NO: 8032 - DNA, 19 bp, Homo sapiens
tcagcgagatctacaattt

SEQ ID NO: 8033 - DNA, 19 bp, Homo sapiens
cagcgagatctacaatttt

SEQ ID NO: 8034 - DNA, 19 bp, Homo sapiens
agcgagatctacaatttta

SEQ ID NO: 8035 - DNA, 19 bp, Homo sapiens
gcgagatctacaattttat

SEQ ID NO: 8036 - DNA, 19 bp, Homo sapiens
cgagatctacaattttatg

SEQ ID NO: 8037 - DNA, 19 bp, Homo sapiens
gagatctacaattttatga

SEQ ID NO: 8038 - DNA, 19 bp, Homo sapiens
agatctacaattttatgac

SEQ ID NO: 8039 - DNA, 19 bp, Homo sapiens
gatctacaattttatgacg

SEQ ID NO: 8040 - DNA, 19 bp, Homo sapiens
atctacaattttatgacgg

SEQ ID NO: 8041 - DNA, 19 bp, Homo sapiens
tctacaattttatgacgga

SEQ ID NO: 8042 - DNA, 19 bp, Homo sapiens
ctacaattttatgacggag

SEQ ID NO: 8043 - DNA, 19 bp, Homo sapiens
tacaattttatgacggagc

SEQ ID NO: 8044 - DNA, 19 bp, Homo sapiens
acaattttatgacggagca

SEQ ID NO: 8045 - DNA, 19 bp, Homo sapiens
caattttatgacggagcac

SEQ ID NO: 8046 - DNA, 19 bp, Homo sapiens
aattttatgacggagcact

SEQ ID NO: 8047 - DNA, 19 bp, Homo sapiens
attttatgacggagcactt

SEQ ID NO: 8048 - DNA, 19 bp, Homo sapiens
ttttatgacggagcacttt

SEQ ID NO: 8049 - DNA, 19 bp, Homo sapiens
tttatgacggagcactttc

SEQ ID NO: 8050 - DNA, 19 bp, Homo sapiens
ttatgacggagcactttcc

SEQ ID NO: 8051 - DNA, 19 bp, Homo sapiens
tatgacggagcactttcct

SEQ ID NO: 8052 - DNA, 19 bp, Homo sapiens
atgacggagcactttcctt

SEQ ID NO: 8053 - DNA, 19 bp, Homo sapiens
tgacggagcactttcctta

SEQ ID NO: 8054 - DNA, 19 bp, Homo sapiens
gacggagcactttccttac

SEQ ID NO: 8055 - DNA, 19 bp, Homo sapiens
acggagcactttccttact

SEQ ID NO: 8056 - DNA, 19 bp, Homo sapiens
cggagcactttccttactt

SEQ ID NO: 8057 - DNA, 19 bp, Homo sapiens
ggagcactttccttacttc

SEQ ID NO: 8058 - DNA, 19 bp, Homo sapiens
gagcactttccttacttca

SEQ ID NO: 8059 - DNA, 19 bp, Homo sapiens
agcactttccttacttcaa

SEQ ID NO: 8060 - DNA, 19 bp, Homo sapiens
gcactttccttacttcaag

SEQ ID NO: 8061 - DNA, 19 bp, Homo sapiens
cactttccttacttcaaga

SEQ ID NO: 8062 - DNA, 19 bp, Homo sapiens
actttccttacttcaagac

SEQ ID NO: 8063 - DNA, 19 bp, Homo sapiens
ctttccttacttcaagaca

SEQ ID NO: 8064 - DNA, 19 bp, Homo sapiens
tttccttacttcaagacag

SEQ ID NO: 8065 - DNA, 19 bp, Homo sapiens
ttccttacttcaagacagc

SEQ ID NO: 8066 - DNA, 19 bp, Homo sapiens
tccttacttcaagacagca

SEQ ID NO: 8067 - DNA, 19 bp, Homo sapiens
ccttacttcaagacagcac

SEQ ID NO: 8068 - DNA, 19 bp, Homo sapiens
cttacttcaagacagcacc

SEQ ID NO: 8069 - DNA, 19 bp, Homo sapiens
ttacttcaagacagcaccc

SEQ ID NO: 8070 - DNA, 19 bp, Homo sapiens
tacttcaagacagcacccg

SEQ ID NO: 8071 - DNA, 19 bp, Homo sapiens
acttcaagacagcacccga

SEQ ID NO: 8072 - DNA, 19 bp, Homo sapiens
cttcaagacagcacccgat

SEQ ID NO: 8073 - DNA, 19 bp, Homo sapiens
ttcaagacagcacccgatg

SEQ ID NO: 8074 - DNA, 19 bp, Homo sapiens
tcaagacagcacccgatgg

SEQ ID NO: 8075 - DNA, 19 bp, Homo sapiens
caagacagcacccgatggc

SEQ ID NO: 8076 - DNA, 19 bp, Homo sapiens
aagacagcacccgatggct

SEQ ID NO: 8077 - DNA, 19 bp, Homo sapiens
agacagcacccgatggctg

SEQ ID NO: 8078 - DNA, 19 bp, Homo sapiens
gacagcacccgatggctgg

SEQ ID NO: 8079 - DNA, 19 bp, Homo sapiens
acagcacccgatggctgga

SEQ ID NO: 8080 - DNA, 19 bp, Homo sapiens
cagcacccgatggctggaa

SEQ ID NO: 8081 - DNA, 19 bp, Homo sapiens
agcacccgatggctggaag

SEQ ID NO: 8082 - DNA, 19 bp, Homo sapiens
gcacccgatggctggaaga

SEQ ID NO: 8083 - DNA, 19 bp, Homo sapiens
cacccgatggctggaagaa

SEQ ID NO: 8084 - DNA, 19 bp, Homo sapiens
acccgatggctggaagaat

SEQ ID NO: 8085 - DNA, 19 bp, Homo sapiens
cccgatggctggaagaatt

SEQ ID NO: 8086 - DNA, 19 bp, Homo sapiens
ccgatggctggaagaattc

SEQ ID NO: 8087 - DNA, 19 bp, Homo sapiens
cgatggctggaagaattct

SEQ ID NO: 8088 - DNA, 19 bp, Homo sapiens
gatggctggaagaattctg

SEQ ID NO: 8089 - DNA, 19 bp, Homo sapiens
atggctggaagaattctgt

SEQ ID NO: 8090 - DNA, 19 bp, Homo sapiens
tggctggaagaattctgtc

SEQ ID NO: 8091 - DNA, 19 bp, Homo sapiens
ggctggaagaattctgtcc

SEQ ID NO: 8092 - DNA, 19 bp, Homo sapiens
gctggaagaattctgtccg

SEQ ID NO: 8093 - DNA, 19 bp, Homo sapiens
ctggaagaattctgtccgg

SEQ ID NO: 8094 - DNA, 19 bp, Homo sapiens
tggaagaattctgtccggc

SEQ ID NO: 8095 - DNA, 19 bp, Homo sapiens
ggaagaattctgtccggca

SEQ ID NO: 8096 - DNA, 19 bp, Homo sapiens
gaagaattctgtccggcac

SEQ ID NO: 8097 - DNA, 19 bp, Homo sapiens
aagaattctgtccggcaca

SEQ ID NO: 8098 - DNA, 19 bp, Homo sapiens
agaattctgtccggcacaa

SEQ ID NO: 8099 - DNA, 19 bp, Homo sapiens
gaattctgtccggcacaac

SEQ ID NO: 8100 - DNA, 19 bp, Homo sapiens
aattctgtccggcacaacc

SEQ ID NO: 8101 - DNA, 19 bp, Homo sapiens
attctgtccggcacaacct

SEQ ID NO: 8102 - DNA, 19 bp, Homo sapiens
ttctgtccggcacaaccta

SEQ ID NO: 8103 - DNA, 19 bp, Homo sapiens
tctgtccggcacaacctat

SEQ ID NO: 8104 - DNA, 19 bp, Homo sapiens
ctgtccggcacaacctatc

SEQ ID NO: 8105 - DNA, 19 bp, Homo sapiens
tgtccggcacaacctatcc

SEQ ID NO: 8106 - DNA, 19 bp, Homo sapiens
gtccggcacaacctatccc

SEQ ID NO: 8107 - DNA, 19 bp, Homo sapiens
tccggcacaacctatccct

SEQ ID NO: 8108 - DNA, 19 bp, Homo sapiens
ccggcacaacctatccctc

SEQ ID NO: 8109 - DNA, 19 bp, Homo sapiens
cggcacaacctatccctca

SEQ ID NO: 8110 - DNA, 19 bp, Homo sapiens
ggcacaacctatccctcaa

SEQ ID NO: 8111 - DNA, 19 bp, Homo sapiens
gcacaacctatccctcaac

SEQ ID NO: 8112 - DNA, 19 bp, Homo sapiens
cacaacctatccctcaaca

SEQ ID NO: 8113 - DNA, 19 bp, Homo sapiens
acaacctatccctcaacaa

SEQ ID NO: 8114 - DNA, 19 bp, Homo sapiens
caacctatccctcaacaag

SEQ ID NO: 8115 - DNA, 19 bp, Homo sapiens
aacctatccctcaacaagt

SEQ ID NO: 8116 - DNA, 19 bp, Homo sapiens
acctatccctcaacaagtg

SEQ ID NO: 8117 - DNA, 19 bp, Homo sapiens
cctatccctcaacaagtgc

SEQ ID NO: 8118 - DNA, 19 bp, Homo sapiens
ctatccctcaacaagtgct

SEQ ID NO: 8119 - DNA, 19 bp, Homo sapiens
tatccctcaacaagtgctt

SEQ ID NO: 8120 - DNA, 19 bp, Homo sapiens
atccctcaacaagtgcttc

SEQ ID NO: 8121 - DNA, 19 bp, Homo sapiens
tccctcaacaagtgcttcg

SEQ ID NO: 8122 - DNA, 19 bp, Homo sapiens
ccctcaacaagtgcttcga

SEQ ID NO: 8123 - DNA, 19 bp, Homo sapiens
cctcaacaagtgcttcgag

SEQ ID NO: 8124 - DNA, 19 bp, Homo sapiens
ctcaacaagtgcttcgaga

SEQ ID NO: 8125 - DNA, 19 bp, Homo sapiens
tcaacaagtgcttcgagaa

SEQ ID NO: 8126 - DNA, 19 bp, Homo sapiens
caacaagtgcttcgagaag

SEQ ID NO: 8127 - DNA, 19 bp, Homo sapiens
aacaagtgcttcgagaagg

SEQ ID NO: 8128 - DNA, 19 bp, Homo sapiens
acaagtgcttcgagaaggt

SEQ ID NO: 8129 - DNA, 19 bp, Homo sapiens
caagtgcttcgagaaggtg

SEQ ID NO: 8130 - DNA, 19 bp, Homo sapiens
aagtgcttcgagaaggtgg

SEQ ID NO: 8131 - DNA, 19 bp, Homo sapiens
agtgcttcgagaaggtgga

SEQ ID NO: 8132 - DNA, 19 bp, Homo sapiens
gtgcttcgagaaggtggag

SEQ ID NO: 8133 - DNA, 19 bp, Homo sapiens
tgcttcgagaaggtggaga

SEQ ID NO: 8134 - DNA, 19 bp, Homo sapiens
gcttcgagaaggtggagaa

SEQ ID NO: 8135 - DNA, 19 bp, Homo sapiens
cttcgagaaggtggagaac

SEQ ID NO: 8136 - DNA, 19 bp, Homo sapiens
ttcgagaaggtggagaaca

SEQ ID NO: 8137 - DNA, 19 bp, Homo sapiens
tcgagaaggtggagaacaa

SEQ ID NO: 8138 - DNA, 19 bp, Homo sapiens
cgagaaggtggagaacaaa

SEQ ID NO: 8139 - DNA, 19 bp, Homo sapiens
gagaaggtggagaacaaat

SEQ ID NO: 8140 - DNA, 19 bp, Homo sapiens
agaaggtggagaacaaatc

SEQ ID NO: 8141 - DNA, 19 bp, Homo sapiens
gaaggtggagaacaaatca

SEQ ID NO: 8142 - DNA, 19 bp, Homo sapiens
aaggtggagaacaaatcag

SEQ ID NO: 8143 - DNA, 19 bp, Homo sapiens
aggtggagaacaaatcagg

SEQ ID NO: 8144 - DNA, 19 bp, Homo sapiens
ggtggagaacaaatcagga

SEQ ID NO: 8145 - DNA, 19 bp, Homo sapiens
gtggagaacaaatcaggaa

SEQ ID NO: 8146 - DNA, 19 bp, Homo sapiens
tggagaacaaatcaggaag

SEQ ID NO: 8147 - DNA, 19 bp, Homo sapiens
ggagaacaaatcaggaagt

SEQ ID NO: 8148 - DNA, 19 bp, Homo sapiens
gagaacaaatcaggaagtt

SEQ ID NO: 8149 - DNA, 19 bp, Homo sapiens
agaacaaatcaggaagttc

SEQ ID NO: 8150 - DNA, 19 bp, Homo sapiens
gaacaaatcaggaagttcc

SEQ ID NO: 8151 - DNA, 19 bp, Homo sapiens
aacaaatcaggaagttcct

SEQ ID NO: 8152 - DNA, 19 bp, Homo sapiens
acaaatcaggaagttcctc

SEQ ID NO: 8153 - DNA, 19 bp, Homo sapiens
caaatcaggaagttcctcc

SEQ ID NO: 8154 - DNA, 19 bp, Homo sapiens
aaatcaggaagttcctccc

SEQ ID NO: 8155 - DNA, 19 bp, Homo sapiens
aatcaggaagttcctcccg

SEQ ID NO: 8156 - DNA, 19 bp, Homo sapiens
atcaggaagttcctcccgc

SEQ ID NO: 8157 - DNA, 19 bp, Homo sapiens
tcaggaagttcctcccgca

SEQ ID NO: 8158 - DNA, 19 bp, Homo sapiens
caggaagttcctcccgcaa

SEQ ID NO: 8159 - DNA, 19 bp, Homo sapiens
aggaagttcctcccgcaag

SEQ ID NO: 8160 - DNA, 19 bp, Homo sapiens
ggaagttcctcccgcaagg

SEQ ID NO: 8161 - DNA, 19 bp, Homo sapiens
gaagttcctcccgcaaggg

SEQ ID NO: 8162 - DNA, 19 bp, Homo sapiens
aagttcctcccgcaagggc

SEQ ID NO: 8163 - DNA, 19 bp, Homo sapiens
agttcctcccgcaagggct

SEQ ID NO: 8164 - DNA, 19 bp, Homo sapiens
gttcctcccgcaagggctg

SEQ ID NO: 8165 - DNA, 19 bp, Homo sapiens
ttcctcccgcaagggctgc

SEQ ID NO: 8166 - DNA, 19 bp, Homo sapiens
tcctcccgcaagggctgcc

SEQ ID NO: 8167 - DNA, 19 bp, Homo sapiens
cctcccgcaagggctgcct

SEQ ID NO: 8168 - DNA, 19 bp, Homo sapiens
ctcccgcaagggctgcctg

SEQ ID NO: 8169 - DNA, 19 bp, Homo sapiens
tcccgcaagggctgcctgt

SEQ ID NO: 8170 - DNA, 19 bp, Homo sapiens
cccgcaagggctgcctgtg

SEQ ID NO: 8171 - DNA, 19 bp, Homo sapiens
ccgcaagggctgcctgtgg

SEQ ID NO: 8172 - DNA, 19 bp, Homo sapiens
cgcaagggctgcctgtggg

SEQ ID NO: 8173 - DNA, 19 bp, Homo sapiens
gcaagggctgcctgtgggc

SEQ ID NO: 8174 - DNA, 19 bp, Homo sapiens
caagggctgcctgtgggcc

SEQ ID NO: 8175 - DNA, 19 bp, Homo sapiens
aagggctgcctgtgggccc

SEQ ID NO: 8176 - DNA, 19 bp, Homo sapiens
agggctgcctgtgggccct

SEQ ID NO: 8177 - DNA, 19 bp, Homo sapiens
gggctgcctgtgggccctc

SEQ ID NO: 8178 - DNA, 19 bp, Homo sapiens
ggctgcctgtgggccctca

SEQ ID NO: 8179 - DNA, 19 bp, Homo sapiens
gctgcctgtgggccctcaa

SEQ ID NO: 8180 - DNA, 19 bp, Homo sapiens
ctgcctgtgggccctcaat

SEQ ID NO: 8181 - DNA, 19 bp, Homo sapiens
tgcctgtgggccctcaatc

SEQ ID NO: 8182 - DNA, 19 bp, Homo sapiens
gcctgtgggccctcaatcc

SEQ ID NO: 8183 - DNA, 19 bp, Homo sapiens
cctgtgggccctcaatccg

SEQ ID NO: 8184 - DNA, 19 bp, Homo sapiens
ctgtgggccctcaatccgg

SEQ ID NO: 8185 - DNA, 19 bp, Homo sapiens
tgtgggccctcaatccggc

SEQ ID NO: 8186 - DNA, 19 bp, Homo sapiens
gtgggccctcaatccggcc

SEQ ID NO: 8187 - DNA, 19 bp, Homo sapiens
tgggccctcaatccggcca

SEQ ID NO: 8188 - DNA, 19 bp, Homo sapiens
gggccctcaatccggccaa

SEQ ID NO: 8189 - DNA, 19 bp, Homo sapiens
ggccctcaatccggccaag

SEQ ID NO: 8190 - DNA, 19 bp, Homo sapiens
gccctcaatccggccaaga

SEQ ID NO: 8191 - DNA, 19 bp, Homo sapiens
ccctcaatccggccaagat

SEQ ID NO: 8192 - DNA, 19 bp, Homo sapiens
cctcaatccggccaagatc

SEQ ID NO: 8193 - DNA, 19 bp, Homo sapiens
ctcaatccggccaagatcg

SEQ ID NO: 8194 - DNA, 19 bp, Homo sapiens
tcaatccggccaagatcga

SEQ ID NO: 8195 - DNA, 19 bp, Homo sapiens
caatccggccaagatcgac

SEQ ID NO: 8196 - DNA, 19 bp, Homo sapiens
aatccggccaagatcgaca

SEQ ID NO: 8197 - DNA, 19 bp, Homo sapiens
atccggccaagatcgacaa

SEQ ID NO: 8198 - DNA, 19 bp, Homo sapiens
tccggccaagatcgacaag

SEQ ID NO: 8199 - DNA, 19 bp, Homo sapiens
ccggccaagatcgacaaga

SEQ ID NO: 8200 - DNA, 19 bp, Homo sapiens
cggccaagatcgacaagat

SEQ ID NO: 8201 - DNA, 19 bp, Homo sapiens
ggccaagatcgacaagatg

SEQ ID NO: 8202 - DNA, 19 bp, Homo sapiens
gccaagatcgacaagatgc

SEQ ID NO: 8203 - DNA, 19 bp, Homo sapiens
ccaagatcgacaagatgca

SEQ ID NO: 8204 - DNA, 19 bp, Homo sapiens
caagatcgacaagatgcaa

SEQ ID NO: 8205 - DNA, 19 bp, Homo sapiens
aagatcgacaagatgcaag

SEQ ID NO: 8206 - DNA, 19 bp, Homo sapiens
agatcgacaagatgcaaga

SEQ ID NO: 8207 - DNA, 19 bp, Homo sapiens
gatcgacaagatgcaagag

SEQ ID NO: 8208 - DNA, 19 bp, Homo sapiens
atcgacaagatgcaagagg

SEQ ID NO: 8209 - DNA, 19 bp, Homo sapiens
tcgacaagatgcaagagga

SEQ ID NO: 8210 - DNA, 19 bp, Homo sapiens
cgacaagatgcaagaggag

SEQ ID NO: 8211 - DNA, 19 bp, Homo sapiens
gacaagatgcaagaggagc

SEQ ID NO: 8212 - DNA, 19 bp, Homo sapiens
acaagatgcaagaggagct

SEQ ID NO: 8213 - DNA, 19 bp, Homo sapiens
caagatgcaagaggagctg

SEQ ID NO: 8214 - DNA, 19 bp, Homo sapiens
aagatgcaagaggagctgc

SEQ ID NO: 8215 - DNA, 19 bp, Homo sapiens
agatgcaagaggagctgca

SEQ ID NO: 8216 - DNA, 19 bp, Homo sapiens
gatgcaagaggagctgcaa

SEQ ID NO: 8217 - DNA, 19 bp, Homo sapiens
atgcaagaggagctgcaaa

SEQ ID NO: 8218 - DNA, 19 bp, Homo sapiens
tgcaagaggagctgcaaaa

SEQ ID NO: 8219 - DNA, 19 bp, Homo sapiens
gcaagaggagctgcaaaaa

SEQ ID NO: 8220 - DNA, 19 bp, Homo sapiens
caagaggagctgcaaaaat

SEQ ID NO: 8221 - DNA, 19 bp, Homo sapiens
aagaggagctgcaaaaatg

SEQ ID NO: 8222 - DNA, 19 bp, Homo sapiens
agaggagctgcaaaaatgg

SEQ ID NO: 8223 - DNA, 19 bp, Homo sapiens
gaggagctgcaaaaatgga

SEQ ID NO: 8224 - DNA, 19 bp, Homo sapiens
aggagctgcaaaaatggaa

SEQ ID NO: 8225 - DNA, 19 bp, Homo sapiens
ggagctgcaaaaatggaag

SEQ ID NO: 8226 - DNA, 19 bp, Homo sapiens
gagctgcaaaaatggaaga

SEQ ID NO: 8227 - DNA, 19 bp, Homo sapiens
agctgcaaaaatggaagag

SEQ ID NO: 8228 - DNA, 19 bp, Homo sapiens
gctgcaaaaatggaagagg

SEQ ID NO: 8229 - DNA, 19 bp, Homo sapiens
ctgcaaaaatggaagagga

SEQ ID NO: 8230 - DNA, 19 bp, Homo sapiens
tgcaaaaatggaagaggaa

SEQ ID NO: 8231 - DNA, 19 bp, Homo sapiens
gcaaaaatggaagaggaaa

SEQ ID NO: 8232 - DNA, 19 bp, Homo sapiens
caaaaatggaagaggaaag

SEQ ID NO: 8233 - DNA, 19 bp, Homo sapiens
aaaaatggaagaggaaaga

SEQ ID NO: 8234 - DNA, 19 bp, Homo sapiens
aaaatggaagaggaaagat

SEQ ID NO: 8235 - DNA, 19 bp, Homo sapiens
aaatggaagaggaaagatc

SEQ ID NO: 8236 - DNA, 19 bp, Homo sapiens
aatggaagaggaaagatcc

SEQ ID NO: 8237 - DNA, 19 bp, Homo sapiens
atggaagaggaaagatccc

SEQ ID NO: 8238 - DNA, 19 bp, Homo sapiens
tggaagaggaaagatccca

SEQ ID NO: 8239 - DNA, 19 bp, Homo sapiens
ggaagaggaaagatcccat

SEQ ID NO: 8240 - DNA, 19 bp, Homo sapiens
gaagaggaaagatcccatt

SEQ ID NO: 8241 - DNA, 19 bp, Homo sapiens
aagaggaaagatcccattg

SEQ ID NO: 8242 - DNA, 19 bp, Homo sapiens
agaggaaagatcccattgc

SEQ ID NO: 8243 - DNA, 19 bp, Homo sapiens
gaggaaagatcccattgct

SEQ ID NO: 8244 - DNA, 19 bp, Homo sapiens
aggaaagatcccattgctg

SEQ ID NO: 8245 - DNA, 19 bp, Homo sapiens
ggaaagatcccattgctgt

SEQ ID NO: 8246 - DNA, 19 bp, Homo sapiens
gaaagatcccattgctgtg

SEQ ID NO: 8247 - DNA, 19 bp, Homo sapiens
aaagatcccattgctgtgc

SEQ ID NO: 8248 - DNA, 19 bp, Homo sapiens
aagatcccattgctgtgcg

SEQ ID NO: 8249 - DNA, 19 bp, Homo sapiens
agatcccattgctgtgcgc

SEQ ID NO: 8250 - DNA, 19 bp, Homo sapiens
gatcccattgctgtgcgca

SEQ ID NO: 8251 - DNA, 19 bp, Homo sapiens
atcccattgctgtgcgcaa

SEQ ID NO: 8252 - DNA, 19 bp, Homo sapiens
tcccattgctgtgcgcaaa

SEQ ID NO: 8253 - DNA, 19 bp, Homo sapiens
cccattgctgtgcgcaaaa

SEQ ID NO: 8254 - DNA, 19 bp, Homo sapiens
ccattgctgtgcgcaaaag

SEQ ID NO: 8255 - DNA, 19 bp, Homo sapiens
cattgctgtgcgcaaaagc

SEQ ID NO: 8256 - DNA, 19 bp, Homo sapiens
attgctgtgcgcaaaagca

SEQ ID NO: 8257 - DNA, 19 bp, Homo sapiens
ttgctgtgcgcaaaagcat

SEQ ID NO: 8258 - DNA, 19 bp, Homo sapiens
tgctgtgcgcaaaagcatg

SEQ ID NO: 8259 - DNA, 19 bp, Homo sapiens
gctgtgcgcaaaagcatgg

SEQ ID NO: 8260 - DNA, 19 bp, Homo sapiens
ctgtgcgcaaaagcatggc

SEQ ID NO: 8261 - DNA, 19 bp, Homo sapiens
tgtgcgcaaaagcatggcc

SEQ ID NO: 8262 - DNA, 19 bp, Homo sapiens
gtgcgcaaaagcatggcca

SEQ ID NO: 8263 - DNA, 19 bp, Homo sapiens
tgcgcaaaagcatggccaa

SEQ ID NO: 8264 - DNA, 19 bp, Homo sapiens
gcgcaaaagcatggccaag

SEQ ID NO: 8265 - DNA, 19 bp, Homo sapiens
cgcaaaagcatggccaagc

SEQ ID NO: 8266 - DNA, 19 bp, Homo sapiens
gcaaaagcatggccaagcc

SEQ ID NO: 8267 - DNA, 19 bp, Homo sapiens
caaaagcatggccaagcca

SEQ ID NO: 8268 - DNA, 19 bp, Homo sapiens
aaaagcatggccaagccag

SEQ ID NO: 8269 - DNA, 19 bp, Homo sapiens
aaagcatggccaagccaga

SEQ ID NO: 8270 - DNA, 19 bp, Homo sapiens
aagcatggccaagccagaa

SEQ ID NO: 8271 - DNA, 19 bp, Homo sapiens
agcatggccaagccagaag

SEQ ID NO: 8272 - DNA, 19 bp, Homo sapiens
gcatggccaagccagaaga

SEQ ID NO: 8273 - DNA, 19 bp, Homo sapiens
catggccaagccagaagag

SEQ ID NO: 8274 - DNA, 19 bp, Homo sapiens
atggccaagccagaagagc

SEQ ID NO: 8275 - DNA, 19 bp, Homo sapiens
tggccaagccagaagagct

SEQ ID NO: 8276 - DNA, 19 bp, Homo sapiens
ggccaagccagaagagctg

SEQ ID NO: 8277 - DNA, 19 bp, Homo sapiens
gccaagccagaagagctgg

SEQ ID NO: 8278 - DNA, 19 bp, Homo sapiens
ccaagccagaagagctgga

SEQ ID NO: 8279 - DNA, 19 bp, Homo sapiens
caagccagaagagctggac

SEQ ID NO: 8280 - DNA, 19 bp, Homo sapiens
aagccagaagagctggaca

SEQ ID NO: 8281 - DNA, 19 bp, Homo sapiens
agccagaagagctggacag

SEQ ID NO: 8282 - DNA, 19 bp, Homo sapiens
gccagaagagctggacagc

SEQ ID NO: 8283 - DNA, 19 bp, Homo sapiens
ccagaagagctggacagcc

SEQ ID NO: 8284 - DNA, 19 bp, Homo sapiens
cagaagagctggacagcct

SEQ ID NO: 8285 - DNA, 19 bp, Homo sapiens
agaagagctggacagcctc

SEQ ID NO: 8286 - DNA, 19 bp, Homo sapiens
gaagagctggacagcctca

SEQ ID NO: 8287 - DNA, 19 bp, Homo sapiens
aagagctggacagcctcat

SEQ ID NO: 8288 - DNA, 19 bp, Homo sapiens
agagctggacagcctcatt

SEQ ID NO: 8289 - DNA, 19 bp, Homo sapiens
gagctggacagcctcattg

SEQ ID NO: 8290 - DNA, 19 bp, Homo sapiens
agctggacagcctcattgg

SEQ ID NO: 8291 - DNA, 19 bp, Homo sapiens
gctggacagcctcattgga

SEQ ID NO: 8292 - DNA, 19 bp, Homo sapiens
ctggacagcctcattggag

SEQ ID NO: 8293 - DNA, 19 bp, Homo sapiens
tggacagcctcattggaga

SEQ ID NO: 8294 - DNA, 19 bp, Homo sapiens
ggacagcctcattggagac

SEQ ID NO: 8295 - DNA, 19 bp, Homo sapiens
gacagcctcattggagaca

SEQ ID NO: 8296 - DNA, 19 bp, Homo sapiens
acagcctcattggagacaa

SEQ ID NO: 8297 - DNA, 19 bp, Homo sapiens
cagcctcattggagacaag

SEQ ID NO: 8298 - DNA, 19 bp, Homo sapiens
agcctcattggagacaaga

SEQ ID NO: 8299 - DNA, 19 bp, Homo sapiens
gcctcattggagacaagag

SEQ ID NO: 8300 - DNA, 19 bp, Homo sapiens
cctcattggagacaagaga

SEQ ID NO: 8301 - DNA, 19 bp, Homo sapiens
ctcattggagacaagagag

SEQ ID NO: 8302 - DNA, 19 bp, Homo sapiens
tcattggagacaagagaga

SEQ ID NO: 8303 - DNA, 19 bp, Homo sapiens
cattggagacaagagagaa

SEQ ID NO: 8304 - DNA, 19 bp, Homo sapiens
attggagacaagagagaaa

SEQ ID NO: 8305 - DNA, 19 bp, Homo sapiens
ttggagacaagagagaaaa

SEQ ID NO: 8306 - DNA, 19 bp, Homo sapiens
tggagacaagagagaaaag

SEQ ID NO: 8307 - DNA, 19 bp, Homo sapiens
ggagacaagagagaaaagc

SEQ ID NO: 8308 - DNA, 19 bp, Homo sapiens
gagacaagagagaaaagct

SEQ ID NO: 8309 - DNA, 19 bp, Homo sapiens
agacaagagagaaaagctg

SEQ ID NO: 8310 - DNA, 19 bp, Homo sapiens
gacaagagagaaaagctgg

SEQ ID NO: 8311 - DNA, 19 bp, Homo sapiens
acaagagagaaaagctggg

SEQ ID NO: 8312 - DNA, 19 bp, Homo sapiens
caagagagaaaagctgggc

SEQ ID NO: 8313 - DNA, 19 bp, Homo sapiens
aagagagaaaagctgggct

SEQ ID NO: 8314 - DNA, 19 bp, Homo sapiens
agagagaaaagctgggctc

SEQ ID NO: 8315 - DNA, 19 bp, Homo sapiens
gagagaaaagctgggctcc

SEQ ID NO: 8316 - DNA, 19 bp, Homo sapiens
agagaaaagctgggctccc

SEQ ID NO: 8317 - DNA, 19 bp, Homo sapiens
gagaaaagctgggctcccc

SEQ ID NO: 8318 - DNA, 19 bp, Homo sapiens
agaaaagctgggctcccca

SEQ ID NO: 8319 - DNA, 19 bp, Homo sapiens
gaaaagctgggctccccac

SEQ ID NO: 8320 - DNA, 19 bp, Homo sapiens
aaaagctgggctccccact

SEQ ID NO: 8321 - DNA, 19 bp, Homo sapiens
aaagctgggctccccactc

SEQ ID NO: 8322 - DNA, 19 bp, Homo sapiens
aagctgggctccccactcc

SEQ ID NO: 8323 - DNA, 19 bp, Homo sapiens
agctgggctccccactcct

SEQ ID NO: 8324 - DNA, 19 bp, Homo sapiens
gctgggctccccactcctg

SEQ ID NO: 8325 - DNA, 19 bp, Homo sapiens
ctgggctccccactcctgg

SEQ ID NO: 8326 - DNA, 19 bp, Homo sapiens
tgggctccccactcctggg

SEQ ID NO: 8327 - DNA, 19 bp, Homo sapiens
gggctccccactcctgggc

SEQ ID NO: 8328 - DNA, 19 bp, Homo sapiens
ggctccccactcctgggct

SEQ ID NO: 8329 - DNA, 19 bp, Homo sapiens
gctccccactcctgggctg

SEQ ID NO: 8330 - DNA, 19 bp, Homo sapiens
ctccccactcctgggctgt

SEQ ID NO: 8331 - DNA, 19 bp, Homo sapiens
tccccactcctgggctgtc

SEQ ID NO: 8332 - DNA, 19 bp, Homo sapiens
ccccactcctgggctgtcc

SEQ ID NO: 8333 - DNA, 19 bp, Homo sapiens
cccactcctgggctgtccg

SEQ ID NO: 8334 - DNA, 19 bp, Homo sapiens
ccactcctgggctgtccgc

SEQ ID NO: 8335 - DNA, 19 bp, Homo sapiens
cactcctgggctgtccgcc

SEQ ID NO: 8336 - DNA, 19 bp, Homo sapiens
actcctgggctgtccgccc

SEQ ID NO: 8337 - DNA, 19 bp, Homo sapiens
ctcctgggctgtccgcccc

SEQ ID NO: 8338 - DNA, 19 bp, Homo sapiens
tcctgggctgtccgccccc

SEQ ID NO: 8339 - DNA, 19 bp, Homo sapiens
cctgggctgtccgccccct

SEQ ID NO: 8340 - DNA, 19 bp, Homo sapiens
ctgggctgtccgccccctg

SEQ ID NO: 8341 - DNA, 19 bp, Homo sapiens
tgggctgtccgccccctgg

SEQ ID NO: 8342 - DNA, 19 bp, Homo sapiens
gggctgtccgccccctggg

SEQ ID NO: 8343 - DNA, 19 bp, Homo sapiens
ggctgtccgccccctgggc

SEQ ID NO: 8344 - DNA, 19 bp, Homo sapiens
gctgtccgccccctgggct

SEQ ID NO: 8345 - DNA, 19 bp, Homo sapiens
ctgtccgccccctgggctg

SEQ ID NO: 8346 - DNA, 19 bp, Homo sapiens
tgtccgccccctgggctgt

SEQ ID NO: 8347 - DNA, 19 bp, Homo sapiens
gtccgccccctgggctgtc

SEQ ID NO: 8348 - DNA, 19 bp, Homo sapiens
tccgccccctgggctgtcc

SEQ ID NO: 8349 - DNA, 19 bp, Homo sapiens
ccgccccctgggctgtccg

SEQ ID NO: 8350 - DNA, 19 bp, Homo sapiens
cgccccctgggctgtccgg

SEQ ID NO: 8351 - DNA, 19 bp, Homo sapiens
gccccctgggctgtccggc

SEQ ID NO: 8352 - DNA, 19 bp, Homo sapiens
ccccctgggctgtccggct

SEQ ID NO: 8353 - DNA, 19 bp, Homo sapiens
cccctgggctgtccggctc

SEQ ID NO: 8354 - DNA, 19 bp, Homo sapiens
ccctgggctgtccggctca

SEQ ID NO: 8355 - DNA, 19 bp, Homo sapiens
cctgggctgtccggctcag

SEQ ID NO: 8356 - DNA, 19 bp, Homo sapiens
ctgggctgtccggctcagg

SEQ ID NO: 8357 - DNA, 19 bp, Homo sapiens
tgggctgtccggctcaggc

SEQ ID NO: 8358 - DNA, 19 bp, Homo sapiens
gggctgtccggctcaggcc

SEQ ID NO: 8359 - DNA, 19 bp, Homo sapiens
ggctgtccggctcaggccc

SEQ ID NO: 8360 - DNA, 19 bp, Homo sapiens
gctgtccggctcaggcccc

SEQ ID NO: 8361 - DNA, 19 bp, Homo sapiens
ctgtccggctcaggcccca

SEQ ID NO: 8362 - DNA, 19 bp, Homo sapiens
tgtccggctcaggccccat

SEQ ID NO: 8363 - DNA, 19 bp, Homo sapiens
gtccggctcaggccccatc

SEQ ID NO: 8364 - DNA, 19 bp, Homo sapiens
tccggctcaggccccatcc

SEQ ID NO: 8365 - DNA, 19 bp, Homo sapiens
ccggctcaggccccatccg

SEQ ID NO: 8366 - DNA, 19 bp, Homo sapiens
cggctcaggccccatccgg

SEQ ID NO: 8367 - DNA, 19 bp, Homo sapiens
ggctcaggccccatccggc

SEQ ID NO: 8368 - DNA, 19 bp, Homo sapiens
gctcaggccccatccggcc

SEQ ID NO: 8369 - DNA, 19 bp, Homo sapiens
ctcaggccccatccggccc

SEQ ID NO: 8370 - DNA, 19 bp, Homo sapiens
tcaggccccatccggcccc

SEQ ID NO: 8371 - DNA, 19 bp, Homo sapiens
caggccccatccggcccct

SEQ ID NO: 8372 - DNA, 19 bp, Homo sapiens
aggccccatccggcccctg

SEQ ID NO: 8373 - DNA, 19 bp, Homo sapiens
ggccccatccggcccctgg

SEQ ID NO: 8374 - DNA, 19 bp, Homo sapiens
gccccatccggcccctggc

SEQ ID NO: 8375 - DNA, 19 bp, Homo sapiens
ccccatccggcccctggca

SEQ ID NO: 8376 - DNA, 19 bp, Homo sapiens
cccatccggcccctggcac

SEQ ID NO: 8377 - DNA, 19 bp, Homo sapiens
ccatccggcccctggcacc

SEQ ID NO: 8378 - DNA, 19 bp, Homo sapiens
catccggcccctggcaccc

SEQ ID NO: 8379 - DNA, 19 bp, Homo sapiens
atccggcccctggcacccc

SEQ ID NO: 8380 - DNA, 19 bp, Homo sapiens
tccggcccctggcaccccc

SEQ ID NO: 8381 - DNA, 19 bp, Homo sapiens
ccggcccctggcaccccca

SEQ ID NO: 8382 - DNA, 19 bp, Homo sapiens
cggcccctggcacccccag

SEQ ID NO: 8383 - DNA, 19 bp, Homo sapiens
ggcccctggcacccccagc

SEQ ID NO: 8384 - DNA, 19 bp, Homo sapiens
gcccctggcacccccagct

SEQ ID NO: 8385 - DNA, 19 bp, Homo sapiens
cccctggcacccccagctg

SEQ ID NO: 8386 - DNA, 19 bp, Homo sapiens
ccctggcacccccagctgg

SEQ ID NO: 8387 - DNA, 19 bp, Homo sapiens
cctggcacccccagctggc

SEQ ID NO: 8388 - DNA, 19 bp, Homo sapiens
ctggcacccccagctggcc

SEQ ID NO: 8389 - DNA, 19 bp, Homo sapiens
tggcacccccagctggcct

SEQ ID NO: 8390 - DNA, 19 bp, Homo sapiens
ggcacccccagctggcctc

SEQ ID NO: 8391 - DNA, 19 bp, Homo sapiens
gcacccccagctggcctct

SEQ ID NO: 8392 - DNA, 19 bp, Homo sapiens
cacccccagctggcctctc

SEQ ID NO: 8393 - DNA, 19 bp, Homo sapiens
acccccagctggcctctcc

SEQ ID NO: 8394 - DNA, 19 bp, Homo sapiens
cccccagctggcctctccc

SEQ ID NO: 8395 - DNA, 19 bp, Homo sapiens
ccccagctggcctctcccc

SEQ ID NO: 8396 - DNA, 19 bp, Homo sapiens
cccagctggcctctcccca

SEQ ID NO: 8397 - DNA, 19 bp, Homo sapiens
ccagctggcctctccccac

SEQ ID NO: 8398 - DNA, 19 bp, Homo sapiens
cagctggcctctccccacc

SEQ ID NO: 8399 - DNA, 19 bp, Homo sapiens
agctggcctctccccacca

SEQ ID NO: 8400 - DNA, 19 bp, Homo sapiens
gctggcctctccccaccac

SEQ ID NO: 8401 - DNA, 19 bp, Homo sapiens
ctggcctctccccaccact

SEQ ID NO: 8402 - DNA, 19 bp, Homo sapiens
tggcctctccccaccactg

SEQ ID NO: 8403 - DNA, 19 bp, Homo sapiens
ggcctctccccaccactgc

SEQ ID NO: 8404 - DNA, 19 bp, Homo sapiens
gcctctccccaccactgca

SEQ ID NO: 8405 - DNA, 19 bp, Homo sapiens
cctctccccaccactgcac

SEQ ID NO: 8406 - DNA, 19 bp, Homo sapiens
ctctccccaccactgcact

SEQ ID NO: 8407 - DNA, 19 bp, Homo sapiens
tctccccaccactgcactc

SEQ ID NO: 8408 - DNA, 19 bp, Homo sapiens
ctccccaccactgcactca

SEQ ID NO: 8409 - DNA, 19 bp, Homo sapiens
tccccaccactgcactcac

SEQ ID NO: 8410 - DNA, 19 bp, Homo sapiens
ccccaccactgcactcact

SEQ ID NO: 8411 - DNA, 19 bp, Homo sapiens
cccaccactgcactcactc

SEQ ID NO: 8412 - DNA, 19 bp, Homo sapiens
ccaccactgcactcactcc

SEQ ID NO: 8413 - DNA, 19 bp, Homo sapiens
caccactgcactcactcca

SEQ ID NO: 8414 - DNA, 19 bp, Homo sapiens
accactgcactcactccac

SEQ ID NO: 8415 - DNA, 19 bp, Homo sapiens
ccactgcactcactccacc

SEQ ID NO: 8416 - DNA, 19 bp, Homo sapiens
cactgcactcactccaccc

SEQ ID NO: 8417 - DNA, 19 bp, Homo sapiens
actgcactcactccaccca

SEQ ID NO: 8418 - DNA, 19 bp, Homo sapiens
ctgcactcactccacccag

SEQ ID NO: 8419 - DNA, 19 bp, Homo sapiens
tgcactcactccacccagc

SEQ ID NO: 8420 - DNA, 19 bp, Homo sapiens
gcactcactccacccagct

SEQ ID NO: 8421 - DNA, 19 bp, Homo sapiens
cactcactccacccagctc

SEQ ID NO: 8422 - DNA, 19 bp, Homo sapiens
actcactccacccagctcc

SEQ ID NO: 8423 - DNA, 19 bp, Homo sapiens
ctcactccacccagctcca

SEQ ID NO: 8424 - DNA, 19 bp, Homo sapiens
tcactccacccagctccag

SEQ ID NO: 8425 - DNA, 19 bp, Homo sapiens
cactccacccagctccagg

SEQ ID NO: 8426 - DNA, 19 bp, Homo sapiens
actccacccagctccaggc

SEQ ID NO: 8427 - DNA, 19 bp, Homo sapiens
ctccacccagctccaggcc

SEQ ID NO: 8428 - DNA, 19 bp, Homo sapiens
tccacccagctccaggccc

SEQ ID NO: 8429 - DNA, 19 bp, Homo sapiens
ccacccagctccaggcccc

SEQ ID NO: 8430 - DNA, 19 bp, Homo sapiens
cacccagctccaggcccca

SEQ ID NO: 8431 - DNA, 19 bp, Homo sapiens
acccagctccaggccccat

SEQ ID NO: 8432 - DNA, 19 bp, Homo sapiens
cccagctccaggccccatt

SEQ ID NO: 8433 - DNA, 19 bp, Homo sapiens
ccagctccaggccccattc

SEQ ID NO: 8434 - DNA, 19 bp, Homo sapiens
cagctccaggccccattcc

SEQ ID NO: 8435 - DNA, 19 bp, Homo sapiens
agctccaggccccattcct

SEQ ID NO: 8436 - DNA, 19 bp, Homo sapiens
gctccaggccccattcctg

SEQ ID NO: 8437 - DNA, 19 bp, Homo sapiens
ctccaggccccattcctgg

SEQ ID NO: 8438 - DNA, 19 bp, Homo sapiens
tccaggccccattcctggc

SEQ ID NO: 8439 - DNA, 19 bp, Homo sapiens
ccaggccccattcctggca

SEQ ID NO: 8440 - DNA, 19 bp, Homo sapiens
caggccccattcctggcaa

SEQ ID NO: 8441 - DNA, 19 bp, Homo sapiens
aggccccattcctggcaag

SEQ ID NO: 8442 - DNA, 19 bp, Homo sapiens
ggccccattcctggcaaga

SEQ ID NO: 8443 - DNA, 19 bp, Homo sapiens
gccccattcctggcaagaa

SEQ ID NO: 8444 - DNA, 19 bp, Homo sapiens
ccccattcctggcaagaac

SEQ ID NO: 8445 - DNA, 19 bp, Homo sapiens
cccattcctggcaagaacc

SEQ ID NO: 8446 - DNA, 19 bp, Homo sapiens
ccattcctggcaagaaccc

SEQ ID NO: 8447 - DNA, 19 bp, Homo sapiens
cattcctggcaagaacccc

SEQ ID NO: 8448 - DNA, 19 bp, Homo sapiens
attcctggcaagaaccccc

SEQ ID NO: 8449 - DNA, 19 bp, Homo sapiens
ttcctggcaagaaccccct

SEQ ID NO: 8450 - DNA, 19 bp, Homo sapiens
tcctggcaagaaccccctg

SEQ ID NO: 8451 - DNA, 19 bp, Homo sapiens
cctggcaagaaccccctgc

SEQ ID NO: 8452 - DNA, 19 bp, Homo sapiens
ctggcaagaaccccctgca

SEQ ID NO: 8453 - DNA, 19 bp, Homo sapiens
tggcaagaaccccctgcag

SEQ ID NO: 8454 - DNA, 19 bp, Homo sapiens
ggcaagaaccccctgcagg

SEQ ID NO: 8455 - DNA, 19 bp, Homo sapiens
gcaagaaccccctgcagga

SEQ ID NO: 8456 - DNA, 19 bp, Homo sapiens
caagaaccccctgcaggac

SEQ ID NO: 8457 - DNA, 19 bp, Homo sapiens
aagaaccccctgcaggacc

SEQ ID NO: 8458 - DNA, 19 bp, Homo sapiens
agaaccccctgcaggacct

SEQ ID NO: 8459 - DNA, 19 bp, Homo sapiens
gaaccccctgcaggaccta

SEQ ID NO: 8460 - DNA, 19 bp, Homo sapiens
aaccccctgcaggacctac

SEQ ID NO: 8461 - DNA, 19 bp, Homo sapiens
accccctgcaggacctact

SEQ ID NO: 8462 - DNA, 19 bp, Homo sapiens
ccccctgcaggacctactt

SEQ ID NO: 8463 - DNA, 19 bp, Homo sapiens
cccctgcaggacctactta

SEQ ID NO: 8464 - DNA, 19 bp, Homo sapiens
ccctgcaggacctacttat

SEQ ID NO: 8465 - DNA, 19 bp, Homo sapiens
cctgcaggacctacttatg

SEQ ID NO: 8466 - DNA, 19 bp, Homo sapiens
ctgcaggacctacttatgg

SEQ ID NO: 8467 - DNA, 19 bp, Homo sapiens
tgcaggacctacttatggg

SEQ ID NO: 8468 - DNA, 19 bp, Homo sapiens
gcaggacctacttatgggg

SEQ ID NO: 8469 - DNA, 19 bp, Homo sapiens
caggacctacttatggggc

SEQ ID NO: 8470 - DNA, 19 bp, Homo sapiens
aggacctacttatggggca

SEQ ID NO: 8471 - DNA, 19 bp, Homo sapiens
ggacctacttatggggcac

SEQ ID NO: 8472 - DNA, 19 bp, Homo sapiens
gacctacttatggggcaca

SEQ ID NO: 8473 - DNA, 19 bp, Homo sapiens
acctacttatggggcacac

SEQ ID NO: 8474 - DNA, 19 bp, Homo sapiens
cctacttatggggcacaca

SEQ ID NO: 8475 - DNA, 19 bp, Homo sapiens
ctacttatggggcacacac

SEQ ID NO: 8476 - DNA, 19 bp, Homo sapiens
tacttatggggcacacacc

SEQ ID NO: 8477 - DNA, 19 bp, Homo sapiens
acttatggggcacacaccc

SEQ ID NO: 8478 - DNA, 19 bp, Homo sapiens
cttatggggcacacaccct

SEQ ID NO: 8479 - DNA, 19 bp, Homo sapiens
ttatggggcacacaccctc

SEQ ID NO: 8480 - DNA, 19 bp, Homo sapiens
tatggggcacacaccctcc

SEQ ID NO: 8481 - DNA, 19 bp, Homo sapiens
atggggcacacaccctcct

SEQ ID NO: 8482 - DNA, 19 bp, Homo sapiens
tggggcacacaccctcctg

SEQ ID NO: 8483 - DNA, 19 bp, Homo sapiens
ggggcacacaccctcctgc

SEQ ID NO: 8484 - DNA, 19 bp, Homo sapiens
gggcacacaccctcctgct

SEQ ID NO: 8485 - DNA, 19 bp, Homo sapiens
ggcacacaccctcctgcta

SEQ ID NO: 8486 - DNA, 19 bp, Homo sapiens
gcacacaccctcctgctat

SEQ ID NO: 8487 - DNA, 19 bp, Homo sapiens
cacacaccctcctgctatg

SEQ ID NO: 8488 - DNA, 19 bp, Homo sapiens
acacaccctcctgctatgg

SEQ ID NO: 8489 - DNA, 19 bp, Homo sapiens
cacaccctcctgctatggg

SEQ ID NO: 8490 - DNA, 19 bp, Homo sapiens
acaccctcctgctatgggc

SEQ ID NO: 8491 - DNA, 19 bp, Homo sapiens
caccctcctgctatgggca

SEQ ID NO: 8492 - DNA, 19 bp, Homo sapiens
accctcctgctatgggcag

SEQ ID NO: 8493 - DNA, 19 bp, Homo sapiens
ccctcctgctatgggcaga

SEQ ID NO: 8494 - DNA, 19 bp, Homo sapiens
cctcctgctatgggcagac

SEQ ID NO: 8495 - DNA, 19 bp, Homo sapiens
ctcctgctatgggcagaca

SEQ ID NO: 8496 - DNA, 19 bp, Homo sapiens
tcctgctatgggcagacat

SEQ ID NO: 8497 - DNA, 19 bp, Homo sapiens
cctgctatgggcagacata

SEQ ID NO: 8498 - DNA, 19 bp, Homo sapiens
ctgctatgggcagacatac

SEQ ID NO: 8499 - DNA, 19 bp, Homo sapiens
tgctatgggcagacatact

SEQ ID NO: 8500 - DNA, 19 bp, Homo sapiens
gctatgggcagacatactt

SEQ ID NO: 8501 - DNA, 19 bp, Homo sapiens
ctatgggcagacatacttg

SEQ ID NO: 8502 - DNA, 19 bp, Homo sapiens
tatgggcagacatacttgc

SEQ ID NO: 8503 - DNA, 19 bp, Homo sapiens
atgggcagacatacttgca

SEQ ID NO: 8504 - DNA, 19 bp, Homo sapiens
tgggcagacatacttgcac

SEQ ID NO: 8505 - DNA, 19 bp, Homo sapiens
gggcagacatacttgcacc

SEQ ID NO: 8506 - DNA, 19 bp, Homo sapiens
ggcagacatacttgcacct

SEQ ID NO: 8507 - DNA, 19 bp, Homo sapiens
gcagacatacttgcacctc

SEQ ID NO: 8508 - DNA, 19 bp, Homo sapiens
cagacatacttgcacctct

SEQ ID NO: 8509 - DNA, 19 bp, Homo sapiens
agacatacttgcacctctc

SEQ ID NO: 8510 - DNA, 19 bp, Homo sapiens
gacatacttgcacctctca

SEQ ID NO: 8511 - DNA, 19 bp, Homo sapiens
acatacttgcacctctcac

SEQ ID NO: 8512 - DNA, 19 bp, Homo sapiens
catacttgcacctctcacc

SEQ ID NO: 8513 - DNA, 19 bp, Homo sapiens
atacttgcacctctcacca

SEQ ID NO: 8514 - DNA, 19 bp, Homo sapiens
tacttgcacctctcaccag

SEQ ID NO: 8515 - DNA, 19 bp, Homo sapiens
acttgcacctctcaccagg

SEQ ID NO: 8516 - DNA, 19 bp, Homo sapiens
cttgcacctctcaccaggc

SEQ ID NO: 8517 - DNA, 19 bp, Homo sapiens
ttgcacctctcaccaggcc

SEQ ID NO: 8518 - DNA, 19 bp, Homo sapiens
tgcacctctcaccaggcct

SEQ ID NO: 8519 - DNA, 19 bp, Homo sapiens
gcacctctcaccaggcctg

SEQ ID NO: 8520 - DNA, 19 bp, Homo sapiens
cacctctcaccaggcctgg

SEQ ID NO: 8521 - DNA, 19 bp, Homo sapiens
acctctcaccaggcctggc

SEQ ID NO: 8522 - DNA, 19 bp, Homo sapiens
cctctcaccaggcctggcc

SEQ ID NO: 8523 - DNA, 19 bp, Homo sapiens
ctctcaccaggcctggccc

SEQ ID NO: 8524 - DNA, 19 bp, Homo sapiens
tctcaccaggcctggcccc

SEQ ID NO: 8525 - DNA, 19 bp, Homo sapiens
ctcaccaggcctggcccct

SEQ ID NO: 8526 - DNA, 19 bp, Homo sapiens
tcaccaggcctggcccctc

SEQ ID NO: 8527 - DNA, 19 bp, Homo sapiens
caccaggcctggcccctcc

SEQ ID NO: 8528 - DNA, 19 bp, Homo sapiens
accaggcctggcccctcct

SEQ ID NO: 8529 - DNA, 19 bp, Homo sapiens
ccaggcctggcccctcctg

SEQ ID NO: 8530 - DNA, 19 bp, Homo sapiens
caggcctggcccctcctgg

SEQ ID NO: 8531 - DNA, 19 bp, Homo sapiens
aggcctggcccctcctgga

SEQ ID NO: 8532 - DNA, 19 bp, Homo sapiens
ggcctggcccctcctggac

SEQ ID NO: 8533 - DNA, 19 bp, Homo sapiens
gcctggcccctcctggacc

SEQ ID NO: 8534 - DNA, 19 bp, Homo sapiens
cctggcccctcctggaccc

SEQ ID NO: 8535 - DNA, 19 bp, Homo sapiens
ctggcccctcctggacccc

SEQ ID NO: 8536 - DNA, 19 bp, Homo sapiens
tggcccctcctggaccccc

SEQ ID NO: 8537 - DNA, 19 bp, Homo sapiens
ggcccctcctggacccccg

SEQ ID NO: 8538 - DNA, 19 bp, Homo sapiens
gcccctcctggacccccgc

SEQ ID NO: 8539 - DNA, 19 bp, Homo sapiens
cccctcctggacccccgca

SEQ ID NO: 8540 - DNA, 19 bp, Homo sapiens
ccctcctggacccccgcag

SEQ ID NO: 8541 - DNA, 19 bp, Homo sapiens
cctcctggacccccgcagc

SEQ ID NO: 8542 - DNA, 19 bp, Homo sapiens
ctcctggacccccgcagcc

SEQ ID NO: 8543 - DNA, 19 bp, Homo sapiens
tcctggacccccgcagcca

SEQ ID NO: 8544 - DNA, 19 bp, Homo sapiens
cctggacccccgcagccat

SEQ ID NO: 8545 - DNA, 19 bp, Homo sapiens
ctggacccccgcagccatt

SEQ ID NO: 8546 - DNA, 19 bp, Homo sapiens
tggacccccgcagccattg

SEQ ID NO: 8547 - DNA, 19 bp, Homo sapiens
ggacccccgcagccattgt

SEQ ID NO: 8548 - DNA, 19 bp, Homo sapiens
gacccccgcagccattgtt

SEQ ID NO: 8549 - DNA, 19 bp, Homo sapiens
acccccgcagccattgttc

SEQ ID NO: 8550 - DNA, 19 bp, Homo sapiens
cccccgcagccattgttcc

SEQ ID NO: 8551 - DNA, 19 bp, Homo sapiens
ccccgcagccattgttccc

SEQ ID NO: 8552 - DNA, 19 bp, Homo sapiens
cccgcagccattgttccca

SEQ ID NO: 8553 - DNA, 19 bp, Homo sapiens
ccgcagccattgttcccac

SEQ ID NO: 8554 - DNA, 19 bp, Homo sapiens
cgcagccattgttcccaca

SEQ ID NO: 8555 - DNA, 19 bp, Homo sapiens
gcagccattgttcccacag

SEQ ID NO: 8556 - DNA, 19 bp, Homo sapiens
cagccattgttcccacagc

SEQ ID NO: 8557 - DNA, 19 bp, Homo sapiens
agccattgttcccacagcc

SEQ ID NO: 8558 - DNA, 19 bp, Homo sapiens
gccattgttcccacagccg

SEQ ID NO: 8559 - DNA, 19 bp, Homo sapiens
ccattgttcccacagccgg

SEQ ID NO: 8560 - DNA, 19 bp, Homo sapiens
cattgttcccacagccgga

SEQ ID NO: 8561 - DNA, 19 bp, Homo sapiens
attgttcccacagccggac

SEQ ID NO: 8562 - DNA, 19 bp, Homo sapiens
ttgttcccacagccggacg

SEQ ID NO: 8563 - DNA, 19 bp, Homo sapiens
tgttcccacagccggacgg

SEQ ID NO: 8564 - DNA, 19 bp, Homo sapiens
gttcccacagccggacggg

SEQ ID NO: 8565 - DNA, 19 bp, Homo sapiens
ttcccacagccggacgggc

SEQ ID NO: 8566 - DNA, 19 bp, Homo sapiens
tcccacagccggacgggca

SEQ ID NO: 8567 - DNA, 19 bp, Homo sapiens
cccacagccggacgggcac

SEQ ID NO: 8568 - DNA, 19 bp, Homo sapiens
ccacagccggacgggcacc

SEQ ID NO: 8569 - DNA, 19 bp, Homo sapiens
cacagccggacgggcacct

SEQ ID NO: 8570 - DNA, 19 bp, Homo sapiens
acagccggacgggcacctt

SEQ ID NO: 8571 - DNA, 19 bp, Homo sapiens
cagccggacgggcaccttg

SEQ ID NO: 8572 - DNA, 19 bp, Homo sapiens
agccggacgggcaccttga

SEQ ID NO: 8573 - DNA, 19 bp, Homo sapiens
gccggacgggcaccttgag

SEQ ID NO: 8574 - DNA, 19 bp, Homo sapiens
ccggacgggcaccttgagc

SEQ ID NO: 8575 - DNA, 19 bp, Homo sapiens
cggacgggcaccttgagct

SEQ ID NO: 8576 - DNA, 19 bp, Homo sapiens
ggacgggcaccttgagctg

SEQ ID NO: 8577 - DNA, 19 bp, Homo sapiens
gacgggcaccttgagctgc

SEQ ID NO: 8578 - DNA, 19 bp, Homo sapiens
acgggcaccttgagctgcg

SEQ ID NO: 8579 - DNA, 19 bp, Homo sapiens
cgggcaccttgagctgcgg

SEQ ID NO: 8580 - DNA, 19 bp, Homo sapiens
gggcaccttgagctgcggg

SEQ ID NO: 8581 - DNA, 19 bp, Homo sapiens
ggcaccttgagctgcgggc

SEQ ID NO: 8582 - DNA, 19 bp, Homo sapiens
gcaccttgagctgcgggcc

SEQ ID NO: 8583 - DNA, 19 bp, Homo sapiens
caccttgagctgcgggccc

SEQ ID NO: 8584 - DNA, 19 bp, Homo sapiens
accttgagctgcgggccca

SEQ ID NO: 8585 - DNA, 19 bp, Homo sapiens
ccttgagctgcgggcccag

SEQ ID NO: 8586 - DNA, 19 bp, Homo sapiens
cttgagctgcgggcccagc

SEQ ID NO: 8587 - DNA, 19 bp, Homo sapiens
ttgagctgcgggcccagcc

SEQ ID NO: 8588 - DNA, 19 bp, Homo sapiens
tgagctgcgggcccagcca

SEQ ID NO: 8589 - DNA, 19 bp, Homo sapiens
gagctgcgggcccagccag

SEQ ID NO: 8590 - DNA, 19 bp, Homo sapiens
agctgcgggcccagccagg

SEQ ID NO: 8591 - DNA, 19 bp, Homo sapiens
gctgcgggcccagccaggc

SEQ ID NO: 8592 - DNA, 19 bp, Homo sapiens
ctgcgggcccagccaggca

SEQ ID NO: 8593 - DNA, 19 bp, Homo sapiens
tgcgggcccagccaggcac

SEQ ID NO: 8594 - DNA, 19 bp, Homo sapiens
gcgggcccagccaggcacc

SEQ ID NO: 8595 - DNA, 19 bp, Homo sapiens
cgggcccagccaggcaccc

SEQ ID NO: 8596 - DNA, 19 bp, Homo sapiens
gggcccagccaggcacccc

SEQ ID NO: 8597 - DNA, 19 bp, Homo sapiens
ggcccagccaggcaccccc

SEQ ID NO: 8598 - DNA, 19 bp, Homo sapiens
gcccagccaggcacccccc

SEQ ID NO: 8599 - DNA, 19 bp, Homo sapiens
cccagccaggcacccccca

SEQ ID NO: 8600 - DNA, 19 bp, Homo sapiens
ccagccaggcaccccccag

SEQ ID NO: 8601 - DNA, 19 bp, Homo sapiens
cagccaggcaccccccagg

SEQ ID NO: 8602 - DNA, 19 bp, Homo sapiens
agccaggcaccccccagga

SEQ ID NO: 8603 - DNA, 19 bp, Homo sapiens
gccaggcaccccccaggac

SEQ ID NO: 8604 - DNA, 19 bp, Homo sapiens
ccaggcaccccccaggact

SEQ ID NO: 8605 - DNA, 19 bp, Homo sapiens
caggcaccccccaggactc

SEQ ID NO: 8606 - DNA, 19 bp, Homo sapiens
aggcaccccccaggactcg

SEQ ID NO: 8607 - DNA, 19 bp, Homo sapiens
ggcaccccccaggactcgc

SEQ ID NO: 8608 - DNA, 19 bp, Homo sapiens
gcaccccccaggactcgcc

SEQ ID NO: 8609 - DNA, 19 bp, Homo sapiens
caccccccaggactcgcct

SEQ ID NO: 8610 - DNA, 19 bp, Homo sapiens
accccccaggactcgcctc

SEQ ID NO: 8611 - DNA, 19 bp, Homo sapiens
ccccccaggactcgcctct

SEQ ID NO: 8612 - DNA, 19 bp, Homo sapiens
cccccaggactcgcctctg

SEQ ID NO: 8613 - DNA, 19 bp, Homo sapiens
ccccaggactcgcctctgc

SEQ ID NO: 8614 - DNA, 19 bp, Homo sapiens
cccaggactcgcctctgcc

SEQ ID NO: 8615 - DNA, 19 bp, Homo sapiens
ccaggactcgcctctgcct

SEQ ID NO: 8616 - DNA, 19 bp, Homo sapiens
caggactcgcctctgcctg

SEQ ID NO: 8617 - DNA, 19 bp, Homo sapiens
aggactcgcctctgcctgc

SEQ ID NO: 8618 - DNA, 19 bp, Homo sapiens
ggactcgcctctgcctgcc

SEQ ID NO: 8619 - DNA, 19 bp, Homo sapiens
gactcgcctctgcctgccc

SEQ ID NO: 8620 - DNA, 19 bp, Homo sapiens
actcgcctctgcctgccca

SEQ ID NO: 8621 - DNA, 19 bp, Homo sapiens
ctcgcctctgcctgcccac

SEQ ID NO: 8622 - DNA, 19 bp, Homo sapiens
tcgcctctgcctgcccaca

SEQ ID NO: 8623 - DNA, 19 bp, Homo sapiens
cgcctctgcctgcccacac

SEQ ID NO: 8624 - DNA, 19 bp, Homo sapiens
gcctctgcctgcccacacc

SEQ ID NO: 8625 - DNA, 19 bp, Homo sapiens
cctctgcctgcccacaccc

SEQ ID NO: 8626 - DNA, 19 bp, Homo sapiens
ctctgcctgcccacacccc

SEQ ID NO: 8627 - DNA, 19 bp, Homo sapiens
tctgcctgcccacacccca

SEQ ID NO: 8628 - DNA, 19 bp, Homo sapiens
ctgcctgcccacaccccac

SEQ ID NO: 8629 - DNA, 19 bp, Homo sapiens
tgcctgcccacaccccacc

SEQ ID NO: 8630 - DNA, 19 bp, Homo sapiens
gcctgcccacaccccaccc

SEQ ID NO: 8631 - DNA, 19 bp, Homo sapiens
cctgcccacaccccaccca

SEQ ID NO: 8632 - DNA, 19 bp, Homo sapiens
ctgcccacaccccacccag

SEQ ID NO: 8633 - DNA, 19 bp, Homo sapiens
tgcccacaccccacccagc

SEQ ID NO: 8634 - DNA, 19 bp, Homo sapiens
gcccacaccccacccagcc

SEQ ID NO: 8635 - DNA, 19 bp, Homo sapiens
cccacaccccacccagcca

SEQ ID NO: 8636 - DNA, 19 bp, Homo sapiens
ccacaccccacccagccac

SEQ ID NO: 8637 - DNA, 19 bp, Homo sapiens
cacaccccacccagccaca

SEQ ID NO: 8638 - DNA, 19 bp, Homo sapiens
acaccccacccagccacag

SEQ ID NO: 8639 - DNA, 19 bp, Homo sapiens
caccccacccagccacagt

SEQ ID NO: 8640 - DNA, 19 bp, Homo sapiens
accccacccagccacagtg

SEQ ID NO: 8641 - DNA, 19 bp, Homo sapiens
ccccacccagccacagtgc

SEQ ID NO: 8642 - DNA, 19 bp, Homo sapiens
cccacccagccacagtgcc

SEQ ID NO: 8643 - DNA, 19 bp, Homo sapiens
ccacccagccacagtgcca

SEQ ID NO: 8644 - DNA, 19 bp, Homo sapiens
cacccagccacagtgccaa

SEQ ID NO: 8645 - DNA, 19 bp, Homo sapiens
acccagccacagtgccaag

SEQ ID NO: 8646 - DNA, 19 bp, Homo sapiens
cccagccacagtgccaagc

SEQ ID NO: 8647 - DNA, 19 bp, Homo sapiens
ccagccacagtgccaagct

SEQ ID NO: 8648 - DNA, 19 bp, Homo sapiens
cagccacagtgccaagcta

SEQ ID NO: 8649 - DNA, 19 bp, Homo sapiens
agccacagtgccaagctac

SEQ ID NO: 8650 - DNA, 19 bp, Homo sapiens
gccacagtgccaagctact

SEQ ID NO: 8651 - DNA, 19 bp, Homo sapiens
ccacagtgccaagctactg

SEQ ID NO: 8652 - DNA, 19 bp, Homo sapiens
cacagtgccaagctactgg

SEQ ID NO: 8653 - DNA, 19 bp, Homo sapiens
acagtgccaagctactggc

SEQ ID NO: 8654 - DNA, 19 bp, Homo sapiens
cagtgccaagctactggcc

SEQ ID NO: 8655 - DNA, 19 bp, Homo sapiens
agtgccaagctactggccg

SEQ ID NO: 8656 - DNA, 19 bp, Homo sapiens
gtgccaagctactggccga

SEQ ID NO: 8657 - DNA, 19 bp, Homo sapiens
tgccaagctactggccgag

SEQ ID NO: 8658 - DNA, 19 bp, Homo sapiens
gccaagctactggccgagc

SEQ ID NO: 8659 - DNA, 19 bp, Homo sapiens
ccaagctactggccgagcc

SEQ ID NO: 8660 - DNA, 19 bp, Homo sapiens
caagctactggccgagcct

SEQ ID NO: 8661 - DNA, 19 bp, Homo sapiens
aagctactggccgagcctt

SEQ ID NO: 8662 - DNA, 19 bp, Homo sapiens
agctactggccgagccttc

SEQ ID NO: 8663 - DNA, 19 bp, Homo sapiens
gctactggccgagccttcc

SEQ ID NO: 8664 - DNA, 19 bp, Homo sapiens
ctactggccgagccttccc

SEQ ID NO: 8665 - DNA, 19 bp, Homo sapiens
tactggccgagccttcccc

SEQ ID NO: 8666 - DNA, 19 bp, Homo sapiens
actggccgagccttcccca

SEQ ID NO: 8667 - DNA, 19 bp, Homo sapiens
ctggccgagccttccccag

SEQ ID NO: 8668 - DNA, 19 bp, Homo sapiens
tggccgagccttccccagc

SEQ ID NO: 8669 - DNA, 19 bp, Homo sapiens
ggccgagccttccccagcc

SEQ ID NO: 8670 - DNA, 19 bp, Homo sapiens
gccgagccttccccagcca

SEQ ID NO: 8671 - DNA, 19 bp, Homo sapiens
ccgagccttccccagccag

SEQ ID NO: 8672 - DNA, 19 bp, Homo sapiens
cgagccttccccagccagg

SEQ ID NO: 8673 - DNA, 19 bp, Homo sapiens
gagccttccccagccagga

SEQ ID NO: 8674 - DNA, 19 bp, Homo sapiens
agccttccccagccaggac

SEQ ID NO: 8675 - DNA, 19 bp, Homo sapiens
gccttccccagccaggact

SEQ ID NO: 8676 - DNA, 19 bp, Homo sapiens
ccttccccagccaggacta

SEQ ID NO: 8677 - DNA, 19 bp, Homo sapiens
cttccccagccaggactat

SEQ ID NO: 8678 - DNA, 19 bp, Homo sapiens
ttccccagccaggactatg

SEQ ID NO: 8679 - DNA, 19 bp, Homo sapiens
tccccagccaggactatgc

SEQ ID NO: 8680 - DNA, 19 bp, Homo sapiens
ccccagccaggactatgca

SEQ ID NO: 8681 - DNA, 19 bp, Homo sapiens
cccagccaggactatgcac

SEQ ID NO: 8682 - DNA, 19 bp, Homo sapiens
ccagccaggactatgcacg

SEQ ID NO: 8683 - DNA, 19 bp, Homo sapiens
cagccaggactatgcacga

SEQ ID NO: 8684 - DNA, 19 bp, Homo sapiens
agccaggactatgcacgac

SEQ ID NO: 8685 - DNA, 19 bp, Homo sapiens
gccaggactatgcacgaca

SEQ ID NO: 8686 - DNA, 19 bp, Homo sapiens
ccaggactatgcacgacac

SEQ ID NO: 8687 - DNA, 19 bp, Homo sapiens
caggactatgcacgacacc

SEQ ID NO: 8688 - DNA, 19 bp, Homo sapiens
aggactatgcacgacaccc

SEQ ID NO: 8689 - DNA, 19 bp, Homo sapiens
ggactatgcacgacaccct

SEQ ID NO: 8690 - DNA, 19 bp, Homo sapiens
gactatgcacgacaccctg

SEQ ID NO: 8691 - DNA, 19 bp, Homo sapiens
actatgcacgacaccctgc

SEQ ID NO: 8692 - DNA, 19 bp, Homo sapiens
ctatgcacgacaccctgct

SEQ ID NO: 8693 - DNA, 19 bp, Homo sapiens
tatgcacgacaccctgctg

SEQ ID NO: 8694 - DNA, 19 bp, Homo sapiens
atgcacgacaccctgctgc

SEQ ID NO: 8695 - DNA, 19 bp, Homo sapiens
tgcacgacaccctgctgcc

SEQ ID NO: 8696 - DNA, 19 bp, Homo sapiens
gcacgacaccctgctgcca

SEQ ID NO: 8697 - DNA, 19 bp, Homo sapiens
cacgacaccctgctgccag

SEQ ID NO: 8698 - DNA, 19 bp, Homo sapiens
acgacaccctgctgccaga

SEQ ID NO: 8699 - DNA, 19 bp, Homo sapiens
cgacaccctgctgccagat

SEQ ID NO: 8700 - DNA, 19 bp, Homo sapiens
gacaccctgctgccagatg

SEQ ID NO: 8701 - DNA, 19 bp, Homo sapiens
acaccctgctgccagatgg

SEQ ID NO: 8702 - DNA, 19 bp, Homo sapiens
caccctgctgccagatgga

SEQ ID NO: 8703 - DNA, 19 bp, Homo sapiens
accctgctgccagatggag

SEQ ID NO: 8704 - DNA, 19 bp, Homo sapiens
ccctgctgccagatggaga

SEQ ID NO: 8705 - DNA, 19 bp, Homo sapiens
cctgctgccagatggagac

SEQ ID NO: 8706 - DNA, 19 bp, Homo sapiens
ctgctgccagatggagacc

SEQ ID NO: 8707 - DNA, 19 bp, Homo sapiens
tgctgccagatggagacct

SEQ ID NO: 8708 - DNA, 19 bp, Homo sapiens
gctgccagatggagacctt

SEQ ID NO: 8709 - DNA, 19 bp, Homo sapiens
ctgccagatggagaccttg

SEQ ID NO: 8710 - DNA, 19 bp, Homo sapiens
tgccagatggagaccttgg

SEQ ID NO: 8711 - DNA, 19 bp, Homo sapiens
gccagatggagaccttggc

SEQ ID NO: 8712 - DNA, 19 bp, Homo sapiens
ccagatggagaccttggca

SEQ ID NO: 8713 - DNA, 19 bp, Homo sapiens
cagatggagaccttggcac

SEQ ID NO: 8714 - DNA, 19 bp, Homo sapiens
agatggagaccttggcact

SEQ ID NO: 8715 - DNA, 19 bp, Homo sapiens
gatggagaccttggcactg

SEQ ID NO: 8716 - DNA, 19 bp, Homo sapiens
atggagaccttggcactga

SEQ ID NO: 8717 - DNA, 19 bp, Homo sapiens
tggagaccttggcactgac

SEQ ID NO: 8718 - DNA, 19 bp, Homo sapiens
ggagaccttggcactgacc

SEQ ID NO: 8719 - DNA, 19 bp, Homo sapiens
gagaccttggcactgacct

SEQ ID NO: 8720 - DNA, 19 bp, Homo sapiens
agaccttggcactgacctg

SEQ ID NO: 8721 - DNA, 19 bp, Homo sapiens
gaccttggcactgacctgg

SEQ ID NO: 8722 - DNA, 19 bp, Homo sapiens
accttggcactgacctgga

SEQ ID NO: 8723 - DNA, 19 bp, Homo sapiens
ccttggcactgacctggat

SEQ ID NO: 8724 - DNA, 19 bp, Homo sapiens
cttggcactgacctggatg

SEQ ID NO: 8725 - DNA, 19 bp, Homo sapiens
ttggcactgacctggatgc

SEQ ID NO: 8726 - DNA, 19 bp, Homo sapiens
tggcactgacctggatgcc

SEQ ID NO: 8727 - DNA, 19 bp, Homo sapiens
ggcactgacctggatgcca

SEQ ID NO: 8728 - DNA, 19 bp, Homo sapiens
gcactgacctggatgccat

SEQ ID NO: 8729 - DNA, 19 bp, Homo sapiens
cactgacctggatgccatc

SEQ ID NO: 8730 - DNA, 19 bp, Homo sapiens
actgacctggatgccatca

SEQ ID NO: 8731 - DNA, 19 bp, Homo sapiens
ctgacctggatgccatcaa

SEQ ID NO: 8732 - DNA, 19 bp, Homo sapiens
tgacctggatgccatcaat

SEQ ID NO: 8733 - DNA, 19 bp, Homo sapiens
gacctggatgccatcaatc

SEQ ID NO: 8734 - DNA, 19 bp, Homo sapiens
acctggatgccatcaatcc

SEQ ID NO: 8735 - DNA, 19 bp, Homo sapiens
cctggatgccatcaatccc

SEQ ID NO: 8736 - DNA, 19 bp, Homo sapiens
ctggatgccatcaatccct

SEQ ID NO: 8737 - DNA, 19 bp, Homo sapiens
tggatgccatcaatccctc

SEQ ID NO: 8738 - DNA, 19 bp, Homo sapiens
ggatgccatcaatccctca

SEQ ID NO: 8739 - DNA, 19 bp, Homo sapiens
gatgccatcaatccctcac

SEQ ID NO: 8740 - DNA, 19 bp, Homo sapiens
atgccatcaatccctcact

SEQ ID NO: 8741 - DNA, 19 bp, Homo sapiens
tgccatcaatccctcactc

SEQ ID NO: 8742 - DNA, 19 bp, Homo sapiens
gccatcaatccctcactca

SEQ ID NO: 8743 - DNA, 19 bp, Homo sapiens
ccatcaatccctcactcac

SEQ ID NO: 8744 - DNA, 19 bp, Homo sapiens
catcaatccctcactcact

SEQ ID NO: 8745 - DNA, 19 bp, Homo sapiens
atcaatccctcactcactg

SEQ ID NO: 8746 - DNA, 19 bp, Homo sapiens
tcaatccctcactcactga

SEQ ID NO: 8747 - DNA, 19 bp, Homo sapiens
caatccctcactcactgac

SEQ ID NO: 8748 - DNA, 19 bp, Homo sapiens
aatccctcactcactgact

SEQ ID NO: 8749 - DNA, 19 bp, Homo sapiens
atccctcactcactgactt

SEQ ID NO: 8750 - DNA, 19 bp, Homo sapiens
tccctcactcactgacttc

SEQ ID NO: 8751 - DNA, 19 bp, Homo sapiens
ccctcactcactgacttcg

SEQ ID NO: 8752 - DNA, 19 bp, Homo sapiens
cctcactcactgacttcga

SEQ ID NO: 8753 - DNA, 19 bp, Homo sapiens
ctcactcactgacttcgac

SEQ ID NO: 8754 - DNA, 19 bp, Homo sapiens
tcactcactgacttcgact

SEQ ID NO: 8755 - DNA, 19 bp, Homo sapiens
cactcactgacttcgactt

SEQ ID NO: 8756 - DNA, 19 bp, Homo sapiens
actcactgacttcgacttc

SEQ ID NO: 8757 - DNA, 19 bp, Homo sapiens
ctcactgacttcgacttcc

SEQ ID NO: 8758 - DNA, 19 bp, Homo sapiens
tcactgacttcgacttcca

SEQ ID NO: 8759 - DNA, 19 bp, Homo sapiens
cactgacttcgacttccag

SEQ ID NO: 8760 - DNA, 19 bp, Homo sapiens
actgacttcgacttccagg

SEQ ID NO: 8761 - DNA, 19 bp, Homo sapiens
ctgacttcgacttccaggg

SEQ ID NO: 8762 - DNA, 19 bp, Homo sapiens
tgacttcgacttccaggga

SEQ ID NO: 8763 - DNA, 19 bp, Homo sapiens
gacttcgacttccagggaa

SEQ ID NO: 8764 - DNA, 19 bp, Homo sapiens
acttcgacttccagggaaa

SEQ ID NO: 8765 - DNA, 19 bp, Homo sapiens
cttcgacttccagggaaac

SEQ ID NO: 8766 - DNA, 19 bp, Homo sapiens
ttcgacttccagggaaacc

SEQ ID NO: 8767 - DNA, 19 bp, Homo sapiens
tcgacttccagggaaacct

SEQ ID NO: 8768 - DNA, 19 bp, Homo sapiens
cgacttccagggaaacctg

SEQ ID NO: 8769 - DNA, 19 bp, Homo sapiens
gacttccagggaaacctgt

SEQ ID NO: 8770 - DNA, 19 bp, Homo sapiens
acttccagggaaacctgtg

SEQ ID NO: 8771 - DNA, 19 bp, Homo sapiens
cttccagggaaacctgtgg

SEQ ID NO: 8772 - DNA, 19 bp, Homo sapiens
ttccagggaaacctgtggg

SEQ ID NO: 8773 - DNA, 19 bp, Homo sapiens
tccagggaaacctgtggga

SEQ ID NO: 8774 - DNA, 19 bp, Homo sapiens
ccagggaaacctgtgggaa

SEQ ID NO: 8775 - DNA, 19 bp, Homo sapiens
cagggaaacctgtgggaac

SEQ ID NO: 8776 - DNA, 19 bp, Homo sapiens
agggaaacctgtgggaaca

SEQ ID NO: 8777 - DNA, 19 bp, Homo sapiens
gggaaacctgtgggaacag

SEQ ID NO: 8778 - DNA, 19 bp, Homo sapiens
ggaaacctgtgggaacagt

SEQ ID NO: 8779 - DNA, 19 bp, Homo sapiens
gaaacctgtgggaacagtt

SEQ ID NO: 8780 - DNA, 19 bp, Homo sapiens
aaacctgtgggaacagttg

SEQ ID NO: 8781 - DNA, 19 bp, Homo sapiens
aacctgtgggaacagttga

SEQ ID NO: 8782 - DNA, 19 bp, Homo sapiens
acctgtgggaacagttgaa

SEQ ID NO: 8783 - DNA, 19 bp, Homo sapiens
cctgtgggaacagttgaag

SEQ ID NO: 8784 - DNA, 19 bp, Homo sapiens
ctgtgggaacagttgaagg

SEQ ID NO: 8785 - DNA, 19 bp, Homo sapiens
tgtgggaacagttgaagga

SEQ ID NO: 8786 - DNA, 19 bp, Homo sapiens
gtgggaacagttgaaggat

SEQ ID NO: 8787 - DNA, 19 bp, Homo sapiens
tgggaacagttgaaggatg

SEQ ID NO: 8788 - DNA, 19 bp, Homo sapiens
gggaacagttgaaggatga

SEQ ID NO: 8789 - DNA, 19 bp, Homo sapiens
ggaacagttgaaggatgat

SEQ ID NO: 8790 - DNA, 19 bp, Homo sapiens
gaacagttgaaggatgata

SEQ ID NO: 8791 - DNA, 19 bp, Homo sapiens
aacagttgaaggatgatag

SEQ ID NO: 8792 - DNA, 19 bp, Homo sapiens
acagttgaaggatgatagc

SEQ ID NO: 8793 - DNA, 19 bp, Homo sapiens
cagttgaaggatgatagct

SEQ ID NO: 8794 - DNA, 19 bp, Homo sapiens
agttgaaggatgatagctt

SEQ ID NO: 8795 - DNA, 19 bp, Homo sapiens
gttgaaggatgatagcttg

SEQ ID NO: 8796 - DNA, 19 bp, Homo sapiens
ttgaaggatgatagcttgg

SEQ ID NO: 8797 - DNA, 19 bp, Homo sapiens
tgaaggatgatagcttggc

SEQ ID NO: 8798 - DNA, 19 bp, Homo sapiens
gaaggatgatagcttggcc

SEQ ID NO: 8799 - DNA, 19 bp, Homo sapiens
aaggatgatagcttggccc

SEQ ID NO: 8800 - DNA, 19 bp, Homo sapiens
aggatgatagcttggccct

SEQ ID NO: 8801 - DNA, 19 bp, Homo sapiens
ggatgatagcttggccctc

SEQ ID NO: 8802 - DNA, 19 bp, Homo sapiens
gatgatagcttggccctcg

SEQ ID NO: 8803 - DNA, 19 bp, Homo sapiens
atgatagcttggccctcga

SEQ ID NO: 8804 - DNA, 19 bp, Homo sapiens
tgatagcttggccctcgac

SEQ ID NO: 8805 - DNA, 19 bp, Homo sapiens
gatagcttggccctcgacc

SEQ ID NO: 8806 - DNA, 19 bp, Homo sapiens
atagcttggccctcgaccc

SEQ ID NO: 8807 - DNA, 19 bp, Homo sapiens
tagcttggccctcgacccc

SEQ ID NO: 8808 - DNA, 19 bp, Homo sapiens
agcttggccctcgaccccc

SEQ ID NO: 8809 - DNA, 19 bp, Homo sapiens
gcttggccctcgaccccct

SEQ ID NO: 8810 - DNA, 19 bp, Homo sapiens
cttggccctcgaccccctg

SEQ ID NO: 8811 - DNA, 19 bp, Homo sapiens
ttggccctcgaccccctgg

SEQ ID NO: 8812 - DNA, 19 bp, Homo sapiens
tggccctcgaccccctggt

SEQ ID NO: 8813 - DNA, 19 bp, Homo sapiens
ggccctcgaccccctggta

SEQ ID NO: 8814 - DNA, 19 bp, Homo sapiens
gccctcgaccccctggtac

SEQ ID NO: 8815 - DNA, 19 bp, Homo sapiens
ccctcgaccccctggtact

SEQ ID NO: 8816 - DNA, 19 bp, Homo sapiens
cctcgaccccctggtactg

SEQ ID NO: 8817 - DNA, 19 bp, Homo sapiens
ctcgaccccctggtactgg

SEQ ID NO: 8818 - DNA, 19 bp, Homo sapiens
tcgaccccctggtactggt

SEQ ID NO: 8819 - DNA, 19 bp, Homo sapiens
cgaccccctggtactggtg

SEQ ID NO: 8820 - DNA, 19 bp, Homo sapiens
gaccccctggtactggtga

SEQ ID NO: 8821 - DNA, 19 bp, Homo sapiens
accccctggtactggtgac

SEQ ID NO: 8822 - DNA, 19 bp, Homo sapiens
ccccctggtactggtgacc

SEQ ID NO: 8823 - DNA, 19 bp, Homo sapiens
cccctggtactggtgacct

SEQ ID NO: 8824 - DNA, 19 bp, Homo sapiens
ccctggtactggtgacctc

SEQ ID NO: 8825 - DNA, 19 bp, Homo sapiens
cctggtactggtgacctca

SEQ ID NO: 8826 - DNA, 19 bp, Homo sapiens
ctggtactggtgacctcat

SEQ ID NO: 8827 - DNA, 19 bp, Homo sapiens
tggtactggtgacctcatc

SEQ ID NO: 8828 - DNA, 19 bp, Homo sapiens
ggtactggtgacctcatcc

SEQ ID NO: 8829 - DNA, 19 bp, Homo sapiens
gtactggtgacctcatccc

SEQ ID NO: 8830 - DNA, 19 bp, Homo sapiens
tactggtgacctcatcccc

SEQ ID NO: 8831 - DNA, 19 bp, Homo sapiens
actggtgacctcatccccg

SEQ ID NO: 8832 - DNA, 19 bp, Homo sapiens
ctggtgacctcatccccga

SEQ ID NO: 8833 - DNA, 19 bp, Homo sapiens
tggtgacctcatccccgac

SEQ ID NO: 8834 - DNA, 19 bp, Homo sapiens
ggtgacctcatccccgaca

SEQ ID NO: 8835 - DNA, 19 bp, Homo sapiens
gtgacctcatccccgacat

SEQ ID NO: 8836 - DNA, 19 bp, Homo sapiens
tgacctcatccccgacatc

SEQ ID NO: 8837 - DNA, 19 bp, Homo sapiens
gacctcatccccgacatca

SEQ ID NO: 8838 - DNA, 19 bp, Homo sapiens
acctcatccccgacatcat

SEQ ID NO: 8839 - DNA, 19 bp, Homo sapiens
cctcatccccgacatcatc

SEQ ID NO: 8840 - DNA, 19 bp, Homo sapiens
ctcatccccgacatcatct

SEQ ID NO: 8841 - DNA, 19 bp, Homo sapiens
tcatccccgacatcatctt

SEQ ID NO: 8842 - DNA, 19 bp, Homo sapiens
catccccgacatcatcttc

SEQ ID NO: 8843 - DNA, 19 bp, Homo sapiens
atccccgacatcatcttcg

SEQ ID NO: 8844 - DNA, 19 bp, Homo sapiens
tccccgacatcatcttcga

SEQ ID NO: 8845 - DNA, 19 bp, Homo sapiens
ccccgacatcatcttcgat

SEQ ID NO: 8846 - DNA, 19 bp, Homo sapiens
cccgacatcatcttcgatg

SEQ ID NO: 8847 - DNA, 19 bp, Homo sapiens
ccgacatcatcttcgatgc

SEQ ID NO: 8848 - DNA, 19 bp, Homo sapiens
cgacatcatcttcgatgcc

SEQ ID NO: 8849 - DNA, 19 bp, Homo sapiens
gacatcatcttcgatgcca

SEQ ID NO: 8850 - DNA, 19 bp, Homo sapiens
acatcatcttcgatgccac

SEQ ID NO: 8851 - DNA, 19 bp, Homo sapiens
catcatcttcgatgccacc

SEQ ID NO: 8852 - DNA, 19 bp, Homo sapiens
atcatcttcgatgccacca

SEQ ID NO: 8853 - DNA, 19 bp, Homo sapiens
tcatcttcgatgccaccac

SEQ ID NO: 8854 - DNA, 19 bp, Homo sapiens
catcttcgatgccaccacc

SEQ ID NO: 8855 - DNA, 19 bp, Homo sapiens
atcttcgatgccaccaccc

SEQ ID NO: 8856 - DNA, 19 bp, Homo sapiens
tcttcgatgccaccacccc

SEQ ID NO: 8857 - DNA, 19 bp, Homo sapiens
cttcgatgccaccacccca

SEQ ID NO: 8858 - DNA, 19 bp, Homo sapiens
ttcgatgccaccaccccag

SEQ ID NO: 8859 - DNA, 19 bp, Homo sapiens
tcgatgccaccaccccagc

SEQ ID NO: 8860 - DNA, 19 bp, Homo sapiens
cgatgccaccaccccagcc

SEQ ID NO: 8861 - DNA, 19 bp, Homo sapiens
gatgccaccaccccagcca

SEQ ID NO: 8862 - DNA, 19 bp, Homo sapiens
atgccaccaccccagccac

SEQ ID NO: 8863 - DNA, 19 bp, Homo sapiens
tgccaccaccccagccacc

SEQ ID NO: 8864 - DNA, 19 bp, Homo sapiens
gccaccaccccagccacca

SEQ ID NO: 8865 - DNA, 19 bp, Homo sapiens
ccaccaccccagccaccac

SEQ ID NO: 8866 - DNA, 19 bp, Homo sapiens
caccaccccagccaccacc

SEQ ID NO: 8867 - DNA, 19 bp, Homo sapiens
accaccccagccaccacct

SEQ ID NO: 8868 - DNA, 19 bp, Homo sapiens
ccaccccagccaccacctc

SEQ ID NO: 8869 - DNA, 19 bp, Homo sapiens
caccccagccaccacctca

SEQ ID NO: 8870 - DNA, 19 bp, Homo sapiens
accccagccaccacctcac

SEQ ID NO: 8871 - DNA, 19 bp, Homo sapiens
ccccagccaccacctcact

SEQ ID NO: 8872 - DNA, 19 bp, Homo sapiens
cccagccaccacctcactg

SEQ ID NO: 8873 - DNA, 19 bp, Homo sapiens
ccagccaccacctcactgc

SEQ ID NO: 8874 - DNA, 19 bp, Homo sapiens
cagccaccacctcactgct

SEQ ID NO: 8875 - DNA, 19 bp, Homo sapiens
agccaccacctcactgctt

SEQ ID NO: 8876 - DNA, 19 bp, Homo sapiens
gccaccacctcactgcttc

SEQ ID NO: 8877 - DNA, 19 bp, Homo sapiens
ccaccacctcactgcttcc

SEQ ID NO: 8878 - DNA, 19 bp, Homo sapiens
caccacctcactgcttccc

SEQ ID NO: 8879 - DNA, 19 bp, Homo sapiens
accacctcactgcttcccc

SEQ ID NO: 8880 - DNA, 19 bp, Homo sapiens
ccacctcactgcttccccc

SEQ ID NO: 8881 - DNA, 19 bp, Homo sapiens
cacctcactgcttcccccc

SEQ ID NO: 8882 - DNA, 19 bp, Homo sapiens
acctcactgcttcccccct

SEQ ID NO: 8883 - DNA, 19 bp, Homo sapiens
cctcactgcttcccccctg

SEQ ID NO: 8884 - DNA, 19 bp, Homo sapiens
ctcactgcttcccccctgg

SEQ ID NO: 8885 - DNA, 19 bp, Homo sapiens
tcactgcttcccccctggg

SEQ ID NO: 8886 - DNA, 19 bp, Homo sapiens
cactgcttcccccctgggc

SEQ ID NO: 8887 - DNA, 19 bp, Homo sapiens
actgcttcccccctgggcc

SEQ ID NO: 8888 - DNA, 19 bp, Homo sapiens
ctgcttcccccctgggccc

SEQ ID NO: 8889 - DNA, 19 bp, Homo sapiens
tgcttcccccctgggccct

SEQ ID NO: 8890 - DNA, 19 bp, Homo sapiens
gcttcccccctgggccctg

SEQ ID NO: 8891 - DNA, 19 bp, Homo sapiens
cttcccccctgggccctgt

SEQ ID NO: 8892 - DNA, 19 bp, Homo sapiens
ttcccccctgggccctgtc

SEQ ID NO: 8893 - DNA, 19 bp, Homo sapiens
tcccccctgggccctgtct

SEQ ID NO: 8894 - DNA, 19 bp, Homo sapiens
cccccctgggccctgtctg

SEQ ID NO: 8895 - DNA, 19 bp, Homo sapiens
ccccctgggccctgtctga

SEQ ID NO: 8896 - DNA, 19 bp, Homo sapiens
cccctgggccctgtctgac

SEQ ID NO: 8897 - DNA, 19 bp, Homo sapiens
ccctgggccctgtctgaca

SEQ ID NO: 8898 - DNA, 19 bp, Homo sapiens
cctgggccctgtctgacag

SEQ ID NO: 8899 - DNA, 19 bp, Homo sapiens
ctgggccctgtctgacaga

SEQ ID NO: 8900 - DNA, 19 bp, Homo sapiens
tgggccctgtctgacagag

SEQ ID NO: 8901 - DNA, 19 bp, Homo sapiens
gggccctgtctgacagaga

SEQ ID NO: 8902 - DNA, 19 bp, Homo sapiens
ggccctgtctgacagagac

SEQ ID NO: 8903 - DNA, 19 bp, Homo sapiens
gccctgtctgacagagaca

SEQ ID NO: 8904 - DNA, 19 bp, Homo sapiens
ccctgtctgacagagacag

SEQ ID NO: 8905 - DNA, 19 bp, Homo sapiens
cctgtctgacagagacagg

SEQ ID NO: 8906 - DNA, 19 bp, Homo sapiens
ctgtctgacagagacaggc

SEQ ID NO: 8907 - DNA, 19 bp, Homo sapiens
tgtctgacagagacaggca

SEQ ID NO: 8908 - DNA, 19 bp, Homo sapiens
gtctgacagagacaggcag

SEQ ID NO: 8909 - DNA, 19 bp, Homo sapiens
tctgacagagacaggcagt

SEQ ID NO: 8910 - DNA, 19 bp, Homo sapiens
ctgacagagacaggcagtg

SEQ ID NO: 8911 - DNA, 19 bp, Homo sapiens
tgacagagacaggcagtgg

SEQ ID NO: 8912 - DNA, 19 bp, Homo sapiens
gacagagacaggcagtggg

SEQ ID NO: 8913 - DNA, 19 bp, Homo sapiens
acagagacaggcagtgggg

SEQ ID NO: 8914 - DNA, 19 bp, Homo sapiens
cagagacaggcagtggggc

SEQ ID NO: 8915 - DNA, 19 bp, Homo sapiens
agagacaggcagtggggca

SEQ ID NO: 8916 - DNA, 19 bp, Homo sapiens
gagacaggcagtggggcag

SEQ ID NO: 8917 - DNA, 19 bp, Homo sapiens
agacaggcagtggggcagg

SEQ ID NO: 8918 - DNA, 19 bp, Homo sapiens
gacaggcagtggggcaggt

SEQ ID NO: 8919 - DNA, 19 bp, Homo sapiens
acaggcagtggggcaggtg

SEQ ID NO: 8920 - DNA, 19 bp, Homo sapiens
caggcagtggggcaggtga

SEQ ID NO: 8921 - DNA, 19 bp, Homo sapiens
aggcagtggggcaggtgac

SEQ ID NO: 8922 - DNA, 19 bp, Homo sapiens
ggcagtggggcaggtgact

SEQ ID NO: 8923 - DNA, 19 bp, Homo sapiens
gcagtggggcaggtgactt

SEQ ID NO: 8924 - DNA, 19 bp, Homo sapiens
cagtggggcaggtgacttg

SEQ ID NO: 8925 - DNA, 19 bp, Homo sapiens
agtggggcaggtgacttgg

SEQ ID NO: 8926 - DNA, 19 bp, Homo sapiens
gtggggcaggtgacttggc

SEQ ID NO: 8927 - DNA, 19 bp, Homo sapiens
tggggcaggtgacttggca

SEQ ID NO: 8928 - DNA, 19 bp, Homo sapiens
ggggcaggtgacttggcag

SEQ ID NO: 8929 - DNA, 19 bp, Homo sapiens
gggcaggtgacttggcagc

SEQ ID NO: 8930 - DNA, 19 bp, Homo sapiens
ggcaggtgacttggcagcc

SEQ ID NO: 8931 - DNA, 19 bp, Homo sapiens
gcaggtgacttggcagccc

SEQ ID NO: 8932 - DNA, 19 bp, Homo sapiens
caggtgacttggcagcccc

SEQ ID NO: 8933 - DNA, 19 bp, Homo sapiens
aggtgacttggcagccccg

SEQ ID NO: 8934 - DNA, 19 bp, Homo sapiens
ggtgacttggcagccccgg

SEQ ID NO: 8935 - DNA, 19 bp, Homo sapiens
gtgacttggcagccccggg

SEQ ID NO: 8936 - DNA, 19 bp, Homo sapiens
tgacttggcagccccgggc

SEQ ID NO: 8937 - DNA, 19 bp, Homo sapiens
gacttggcagccccgggca

SEQ ID NO: 8938 - DNA, 19 bp, Homo sapiens
acttggcagccccgggcag

SEQ ID NO: 8939 - DNA, 19 bp, Homo sapiens
cttggcagccccgggcagt

SEQ ID NO: 8940 - DNA, 19 bp, Homo sapiens
ttggcagccccgggcagtg

SEQ ID NO: 8941 - DNA, 19 bp, Homo sapiens
tggcagccccgggcagtgg

SEQ ID NO: 8942 - DNA, 19 bp, Homo sapiens
ggcagccccgggcagtggt

SEQ ID NO: 8943 - DNA, 19 bp, Homo sapiens
gcagccccgggcagtggtg

SEQ ID NO: 8944 - DNA, 19 bp, Homo sapiens
cagccccgggcagtggtgg

SEQ ID NO: 8945 - DNA, 19 bp, Homo sapiens
agccccgggcagtggtggc

SEQ ID NO: 8946 - DNA, 19 bp, Homo sapiens
gccccgggcagtggtggct

SEQ ID NO: 8947 - DNA, 19 bp, Homo sapiens
ccccgggcagtggtggctc

SEQ ID NO: 8948 - DNA, 19 bp, Homo sapiens
cccgggcagtggtggctcc

SEQ ID NO: 8949 - DNA, 19 bp, Homo sapiens
ccgggcagtggtggctccg

SEQ ID NO: 8950 - DNA, 19 bp, Homo sapiens
cgggcagtggtggctccgg

SEQ ID NO: 8951 - DNA, 19 bp, Homo sapiens
gggcagtggtggctccggg

SEQ ID NO: 8952 - DNA, 19 bp, Homo sapiens
ggcagtggtggctccgggg

SEQ ID NO: 8953 - DNA, 19 bp, Homo sapiens
gcagtggtggctccggggc

SEQ ID NO: 8954 - DNA, 19 bp, Homo sapiens
cagtggtggctccggggca

SEQ ID NO: 8955 - DNA, 19 bp, Homo sapiens
agtggtggctccggggcac

SEQ ID NO: 8956 - DNA, 19 bp, Homo sapiens
gtggtggctccggggcact

SEQ ID NO: 8957 - DNA, 19 bp, Homo sapiens
tggtggctccggggcactg

SEQ ID NO: 8958 - DNA, 19 bp, Homo sapiens
ggtggctccggggcactgg

SEQ ID NO: 8959 - DNA, 19 bp, Homo sapiens
gtggctccggggcactggg

SEQ ID NO: 8960 - DNA, 19 bp, Homo sapiens
tggctccggggcactgggt

SEQ ID NO: 8961 - DNA, 19 bp, Homo sapiens
ggctccggggcactgggtg

SEQ ID NO: 8962 - DNA, 19 bp, Homo sapiens
gctccggggcactgggtga

SEQ ID NO: 8963 - DNA, 19 bp, Homo sapiens
ctccggggcactgggtgac

SEQ ID NO: 8964 - DNA, 19 bp, Homo sapiens
tccggggcactgggtgacc

SEQ ID NO: 8965 - DNA, 19 bp, Homo sapiens
ccggggcactgggtgacct

SEQ ID NO: 8966 - DNA, 19 bp, Homo sapiens
cggggcactgggtgacctg

SEQ ID NO: 8967 - DNA, 19 bp, Homo sapiens
ggggcactgggtgacctgc

SEQ ID NO: 8968 - DNA, 19 bp, Homo sapiens
gggcactgggtgacctgca

SEQ ID NO: 8969 - DNA, 19 bp, Homo sapiens
ggcactgggtgacctgcac

SEQ ID NO: 8970 - DNA, 19 bp, Homo sapiens
gcactgggtgacctgcacc

SEQ ID NO: 8971 - DNA, 19 bp, Homo sapiens
cactgggtgacctgcacct

SEQ ID NO: 8972 - DNA, 19 bp, Homo sapiens
actgggtgacctgcacctc

SEQ ID NO: 8973 - DNA, 19 bp, Homo sapiens
ctgggtgacctgcacctca

SEQ ID NO: 8974 - DNA, 19 bp, Homo sapiens
tgggtgacctgcacctcac

SEQ ID NO: 8975 - DNA, 19 bp, Homo sapiens
gggtgacctgcacctcacc

SEQ ID NO: 8976 - DNA, 19 bp, Homo sapiens
ggtgacctgcacctcacca

SEQ ID NO: 8977 - DNA, 19 bp, Homo sapiens
gtgacctgcacctcaccac

SEQ ID NO: 8978 - DNA, 19 bp, Homo sapiens
tgacctgcacctcaccacc

SEQ ID NO: 8979 - DNA, 19 bp, Homo sapiens
gacctgcacctcaccaccc

SEQ ID NO: 8980 - DNA, 19 bp, Homo sapiens
acctgcacctcaccaccct

SEQ ID NO: 8981 - DNA, 19 bp, Homo sapiens
cctgcacctcaccaccctc

SEQ ID NO: 8982 - DNA, 19 bp, Homo sapiens
ctgcacctcaccaccctct

SEQ ID NO: 8983 - DNA, 19 bp, Homo sapiens
tgcacctcaccaccctcta

SEQ ID NO: 8984 - DNA, 19 bp, Homo sapiens
gcacctcaccaccctctac

SEQ ID NO: 8985 - DNA, 19 bp, Homo sapiens
cacctcaccaccctctact

SEQ ID NO: 8986 - DNA, 19 bp, Homo sapiens
acctcaccaccctctactc

SEQ ID NO: 8987 - DNA, 19 bp, Homo sapiens
cctcaccaccctctactct

SEQ ID NO: 8988 - DNA, 19 bp, Homo sapiens
ctcaccaccctctactctg

SEQ ID NO: 8989 - DNA, 19 bp, Homo sapiens
tcaccaccctctactctgc

SEQ ID NO: 8990 - DNA, 19 bp, Homo sapiens
caccaccctctactctgcc

SEQ ID NO: 8991 - DNA, 19 bp, Homo sapiens
accaccctctactctgcct

SEQ ID NO: 8992 - DNA, 19 bp, Homo sapiens
ccaccctctactctgcctt

SEQ ID NO: 8993 - DNA, 19 bp, Homo sapiens
caccctctactctgccttt

SEQ ID NO: 8994 - DNA, 19 bp, Homo sapiens
accctctactctgccttta

SEQ ID NO: 8995 - DNA, 19 bp, Homo sapiens
ccctctactctgcctttat

SEQ ID NO: 8996 - DNA, 19 bp, Homo sapiens
cctctactctgcctttatg

SEQ ID NO: 8997 - DNA, 19 bp, Homo sapiens
ctctactctgcctttatgg

SEQ ID NO: 8998 - DNA, 19 bp, Homo sapiens
tctactctgcctttatgga

SEQ ID NO: 8999 - DNA, 19 bp, Homo sapiens
ctactctgcctttatggag

SEQ ID NO: 9000 - DNA, 19 bp, Homo sapiens
tactctgcctttatggagc

SEQ ID NO: 9001 - DNA, 19 bp, Homo sapiens
actctgcctttatggagct

SEQ ID NO: 9002 - DNA, 19 bp, Homo sapiens
ctctgcctttatggagctg

SEQ ID NO: 9003 - DNA, 19 bp, Homo sapiens
tctgcctttatggagctgg

SEQ ID NO: 9004 - DNA, 19 bp, Homo sapiens
ctgcctttatggagctgga

SEQ ID NO: 9005 - DNA, 19 bp, Homo sapiens
tgcctttatggagctggag

SEQ ID NO: 9006 - DNA, 19 bp, Homo sapiens
gcctttatggagctggagc

SEQ ID NO: 9007 - DNA, 19 bp, Homo sapiens
cctttatggagctggagcc

SEQ ID NO: 9008 - DNA, 19 bp, Homo sapiens
ctttatggagctggagccc

SEQ ID NO: 9009 - DNA, 19 bp, Homo sapiens
tttatggagctggagccca

SEQ ID NO: 9010 - DNA, 19 bp, Homo sapiens
ttatggagctggagcccac

SEQ ID NO: 9011 - DNA, 19 bp, Homo sapiens
tatggagctggagcccacg

SEQ ID NO: 9012 - DNA, 19 bp, Homo sapiens
atggagctggagcccacgc

SEQ ID NO: 9013 - DNA, 19 bp, Homo sapiens
tggagctggagcccacgcc

SEQ ID NO: 9014 - DNA, 19 bp, Homo sapiens
ggagctggagcccacgccc

SEQ ID NO: 9015 - DNA, 19 bp, Homo sapiens
gagctggagcccacgcccc

SEQ ID NO: 9016 - DNA, 19 bp, Homo sapiens
agctggagcccacgccccc

SEQ ID NO: 9017 - DNA, 19 bp, Homo sapiens
gctggagcccacgcccccc

SEQ ID NO: 9018 - DNA, 19 bp, Homo sapiens
ctggagcccacgcccccca

SEQ ID NO: 9019 - DNA, 19 bp, Homo sapiens
tggagcccacgccccccac

SEQ ID NO: 9020 - DNA, 19 bp, Homo sapiens
ggagcccacgccccccacg

SEQ ID NO: 9021 - DNA, 19 bp, Homo sapiens
gagcccacgccccccacgg

SEQ ID NO: 9022 - DNA, 19 bp, Homo sapiens
agcccacgccccccacggc

SEQ ID NO: 9023 - DNA, 19 bp, Homo sapiens
gcccacgccccccacggcc

SEQ ID NO: 9024 - DNA, 19 bp, Homo sapiens
cccacgccccccacggccc

SEQ ID NO: 9025 - DNA, 19 bp, Homo sapiens
ccacgccccccacggcccc

SEQ ID NO: 9026 - DNA, 19 bp, Homo sapiens
cacgccccccacggcccct

SEQ ID NO: 9027 - DNA, 19 bp, Homo sapiens
acgccccccacggcccctg

SEQ ID NO: 9028 - DNA, 19 bp, Homo sapiens
cgccccccacggcccctgc

SEQ ID NO: 9029 - DNA, 19 bp, Homo sapiens
gccccccacggcccctgca

SEQ ID NO: 9030 - DNA, 19 bp, Homo sapiens
ccccccacggcccctgcag

SEQ ID NO: 9031 - DNA, 19 bp, Homo sapiens
cccccacggcccctgcagg

SEQ ID NO: 9032 - DNA, 19 bp, Homo sapiens
ccccacggcccctgcaggc

SEQ ID NO: 9033 - DNA, 19 bp, Homo sapiens
cccacggcccctgcaggcc

SEQ ID NO: 9034 - DNA, 19 bp, Homo sapiens
ccacggcccctgcaggccc

SEQ ID NO: 9035 - DNA, 19 bp, Homo sapiens
cacggcccctgcaggcccc

SEQ ID NO: 9036 - DNA, 19 bp, Homo sapiens
acggcccctgcaggcccct

SEQ ID NO: 9037 - DNA, 19 bp, Homo sapiens
cggcccctgcaggcccctc

SEQ ID NO: 9038 - DNA, 19 bp, Homo sapiens
ggcccctgcaggcccctct

SEQ ID NO: 9039 - DNA, 19 bp, Homo sapiens
gcccctgcaggcccctctg

SEQ ID NO: 9040 - DNA, 19 bp, Homo sapiens
cccctgcaggcccctctgt

SEQ ID NO: 9041 - DNA, 19 bp, Homo sapiens
ccctgcaggcccctctgtg

SEQ ID NO: 9042 - DNA, 19 bp, Homo sapiens
cctgcaggcccctctgtgt

SEQ ID NO: 9043 - DNA, 19 bp, Homo sapiens
ctgcaggcccctctgtgta

SEQ ID NO: 9044 - DNA, 19 bp, Homo sapiens
tgcaggcccctctgtgtac

SEQ ID NO: 9045 - DNA, 19 bp, Homo sapiens
gcaggcccctctgtgtacc

SEQ ID NO: 9046 - DNA, 19 bp, Homo sapiens
caggcccctctgtgtacct

SEQ ID NO: 9047 - DNA, 19 bp, Homo sapiens
aggcccctctgtgtacctc

SEQ ID NO: 9048 - DNA, 19 bp, Homo sapiens
ggcccctctgtgtacctca

SEQ ID NO: 9049 - DNA, 19 bp, Homo sapiens
gcccctctgtgtacctcag

SEQ ID NO: 9050 - DNA, 19 bp, Homo sapiens
cccctctgtgtacctcagc

SEQ ID NO: 9051 - DNA, 19 bp, Homo sapiens
ccctctgtgtacctcagcc

SEQ ID NO: 9052 - DNA, 19 bp, Homo sapiens
cctctgtgtacctcagccc

SEQ ID NO: 9053 - DNA, 19 bp, Homo sapiens
ctctgtgtacctcagcccc

SEQ ID NO: 9054 - DNA, 19 bp, Homo sapiens
tctgtgtacctcagcccca

SEQ ID NO: 9055 - DNA, 19 bp, Homo sapiens
ctgtgtacctcagccccag

SEQ ID NO: 9056 - DNA, 19 bp, Homo sapiens
tgtgtacctcagccccagc

SEQ ID NO: 9057 - DNA, 19 bp, Homo sapiens
gtgtacctcagccccagct

SEQ ID NO: 9058 - DNA, 19 bp, Homo sapiens
tgtacctcagccccagctc

SEQ ID NO: 9059 - DNA, 19 bp, Homo sapiens
gtacctcagccccagctcc

SEQ ID NO: 9060 - DNA, 19 bp, Homo sapiens
tacctcagccccagctcca

SEQ ID NO: 9061 - DNA, 19 bp, Homo sapiens
acctcagccccagctccaa

SEQ ID NO: 9062 - DNA, 19 bp, Homo sapiens
cctcagccccagctccaag

SEQ ID NO: 9063 - DNA, 19 bp, Homo sapiens
ctcagccccagctccaagc

SEQ ID NO: 9064 - DNA, 19 bp, Homo sapiens
tcagccccagctccaagcc

SEQ ID NO: 9065 - DNA, 19 bp, Homo sapiens
cagccccagctccaagccc

SEQ ID NO: 9066 - DNA, 19 bp, Homo sapiens
agccccagctccaagcccg

SEQ ID NO: 9067 - DNA, 19 bp, Homo sapiens
gccccagctccaagcccgt

SEQ ID NO: 9068 - DNA, 19 bp, Homo sapiens
ccccagctccaagcccgtg

SEQ ID NO: 9069 - DNA, 19 bp, Homo sapiens
cccagctccaagcccgtgg

SEQ ID NO: 9070 - DNA, 19 bp, Homo sapiens
ccagctccaagcccgtggc

SEQ ID NO: 9071 - DNA, 19 bp, Homo sapiens
cagctccaagcccgtggcc

SEQ ID NO: 9072 - DNA, 19 bp, Homo sapiens
agctccaagcccgtggccc

SEQ ID NO: 9073 - DNA, 19 bp, Homo sapiens
gctccaagcccgtggccct

SEQ ID NO: 9074 - DNA, 19 bp, Homo sapiens
ctccaagcccgtggccctg

SEQ ID NO: 9075 - DNA, 19 bp, Homo sapiens
tccaagcccgtggccctgg

SEQ ID NO: 9076 - DNA, 19 bp, Homo sapiens
ccaagcccgtggccctggc

SEQ ID NO: 9077 - DNA, 19 bp, Homo sapiens
caagcccgtggccctggca

SEQ ID NO: 9078 - DNA, 19 bp, Homo sapiens
aagcccgtggccctggcat

SEQ ID NO: 9079 - DNA, 19 bp, Homo sapiens
agcccgtggccctggcatg

SEQ ID NO: 9080 - DNA, 19 bp, Homo sapiens
gcccgtggccctggcatga

SEQ ID NO: 9081 - DNA, 19 bp, Homo sapiens
cccgtggccctggcatgag

SEQ ID NO: 9082 - DNA, 19 bp, Homo sapiens
ccgtggccctggcatgagc

SEQ ID NO: 9083 - DNA, 19 bp, Homo sapiens
cgtggccctggcatgagct

SEQ ID NO: 9084 - DNA, 19 bp, Homo sapiens
gtggccctggcatgagctg

SEQ ID NO: 9085 - DNA, 19 bp, Homo sapiens
tggccctggcatgagctgt

SEQ ID NO: 9086 - DNA, 19 bp, Homo sapiens
ggccctggcatgagctgtg

SEQ ID NO: 9087 - DNA, 19 bp, Homo sapiens
gccctggcatgagctgtgc

SEQ ID NO: 9088 - DNA, 19 bp, Homo sapiens
ccctggcatgagctgtgcc

SEQ ID NO: 9089 - DNA, 19 bp, Homo sapiens
cctggcatgagctgtgccc

SEQ ID NO: 9090 - DNA, 19 bp, Homo sapiens
ctggcatgagctgtgccca

SEQ ID NO: 9091 - DNA, 19 bp, Homo sapiens
tggcatgagctgtgcccag

SEQ ID NO: 9092 - DNA, 19 bp, Homo sapiens
ggcatgagctgtgcccagc

SEQ ID NO: 9093 - DNA, 19 bp, Homo sapiens
gcatgagctgtgcccagct

SEQ ID NO: 9094 - DNA, 19 bp, Homo sapiens
catgagctgtgcccagctt

SEQ ID NO: 9095 - DNA, 19 bp, Homo sapiens
atgagctgtgcccagcttc

SEQ ID NO: 9096 - DNA, 19 bp, Homo sapiens
tgagctgtgcccagcttcg

SEQ ID NO: 9097 - DNA, 19 bp, Homo sapiens
gagctgtgcccagcttcgt

SEQ ID NO: 9098 - DNA, 19 bp, Homo sapiens
agctgtgcccagcttcgtc

SEQ ID NO: 9099 - DNA, 19 bp, Homo sapiens
gctgtgcccagcttcgtca

SEQ ID NO: 9100 - DNA, 19 bp, Homo sapiens
ctgtgcccagcttcgtcag

SEQ ID NO: 9101 - DNA, 19 bp, Homo sapiens
tgtgcccagcttcgtcagc

SEQ ID NO: 9102 - DNA, 19 bp, Homo sapiens
gtgcccagcttcgtcagct

SEQ ID NO: 9103 - DNA, 19 bp, Homo sapiens
tgcccagcttcgtcagctc

SEQ ID NO: 9104 - DNA, 19 bp, Homo sapiens
gcccagcttcgtcagctcc

SEQ ID NO: 9105 - DNA, 19 bp, Homo sapiens
cccagcttcgtcagctcca

SEQ ID NO: 9106 - DNA, 19 bp, Homo sapiens
ccagcttcgtcagctccag

SEQ ID NO: 9107 - DNA, 19 bp, Homo sapiens
cagcttcgtcagctccagc

SEQ ID NO: 9108 - DNA, 19 bp, Homo sapiens
agcttcgtcagctccagcg

SEQ ID NO: 9109 - DNA, 19 bp, Homo sapiens
gcttcgtcagctccagcgt

SEQ ID NO: 9110 - DNA, 19 bp, Homo sapiens
cttcgtcagctccagcgtt

SEQ ID NO: 9111 - DNA, 19 bp, Homo sapiens
ttcgtcagctccagcgttt

SEQ ID NO: 9112 - DNA, 19 bp, Homo sapiens
tcgtcagctccagcgtttg

SEQ ID NO: 9113 - DNA, 19 bp, Homo sapiens
cgtcagctccagcgtttgc

SEQ ID NO: 9114 - DNA, 19 bp, Homo sapiens
gtcagctccagcgtttgcc

SEQ ID NO: 9115 - DNA, 19 bp, Homo sapiens
tcagctccagcgtttgcct

SEQ ID NO: 9116 - DNA, 19 bp, Homo sapiens
cagctccagcgtttgcctg

SEQ ID NO: 9117 - DNA, 19 bp, Homo sapiens
agctccagcgtttgcctgg

SEQ ID NO: 9118 - DNA, 19 bp, Homo sapiens
gctccagcgtttgcctggt

SEQ ID NO: 9119 - DNA, 19 bp, Homo sapiens
ctccagcgtttgcctggtc

SEQ ID NO: 9120 - DNA, 19 bp, Homo sapiens
tccagcgtttgcctggtct

SEQ ID NO: 9121 - DNA, 19 bp, Homo sapiens
ccagcgtttgcctggtctg

SEQ ID NO: 9122 - DNA, 19 bp, Homo sapiens
cagcgtttgcctggtctgg

SEQ ID NO: 9123 - DNA, 19 bp, Homo sapiens
agcgtttgcctggtctgga

SEQ ID NO: 9124 - DNA, 19 bp, Homo sapiens
gcgtttgcctggtctggaa

SEQ ID NO: 9125 - DNA, 19 bp, Homo sapiens
cgtttgcctggtctggaag

SEQ ID NO: 9126 - DNA, 19 bp, Homo sapiens
gtttgcctggtctggaagt

SEQ ID NO: 9127 - DNA, 19 bp, Homo sapiens
tttgcctggtctggaagtc

SEQ ID NO: 9128 - DNA, 19 bp, Homo sapiens
ttgcctggtctggaagtcc

SEQ ID NO: 9129 - DNA, 19 bp, Homo sapiens
tgcctggtctggaagtcct

SEQ ID NO: 9130 - DNA, 19 bp, Homo sapiens
gcctggtctggaagtcctg

SEQ ID NO: 9131 - DNA, 19 bp, Homo sapiens
cctggtctggaagtcctgg

SEQ ID NO: 9132 - DNA, 19 bp, Homo sapiens
ctggtctggaagtcctggc

SEQ ID NO: 9133 - DNA, 19 bp, Homo sapiens
tggtctggaagtcctggcc

SEQ ID NO: 9134 - DNA, 19 bp, Homo sapiens
ggtctggaagtcctggccg

SEQ ID NO: 9135 - DNA, 19 bp, Homo sapiens
gtctggaagtcctggccgg

SEQ ID NO: 9136 - DNA, 19 bp, Homo sapiens
tctggaagtcctggccggc

SEQ ID NO: 9137 - DNA, 19 bp, Homo sapiens
ctggaagtcctggccggcc

SEQ ID NO: 9138 - DNA, 19 bp, Homo sapiens
tggaagtcctggccggccg

SEQ ID NO: 9139 - DNA, 19 bp, Homo sapiens
ggaagtcctggccggccgc

SEQ ID NO: 9140 - DNA, 19 bp, Homo sapiens
gaagtcctggccggccgcc

SEQ ID NO: 9141 - DNA, 19 bp, Homo sapiens
aagtcctggccggccgccc

SEQ ID NO: 9142 - DNA, 19 bp, Homo sapiens
agtcctggccggccgccca

SEQ ID NO: 9143 - DNA, 19 bp, Homo sapiens
gtcctggccggccgcccac

SEQ ID NO: 9144 - DNA, 19 bp, Homo sapiens
tcctggccggccgcccaca

SEQ ID NO: 9145 - DNA, 19 bp, Homo sapiens
cctggccggccgcccacat

SEQ ID NO: 9146 - DNA, 19 bp, Homo sapiens
ctggccggccgcccacatc

SEQ ID NO: 9147 - DNA, 19 bp, Homo sapiens
tggccggccgcccacatcg

SEQ ID NO: 9148 - DNA, 19 bp, Homo sapiens
ggccggccgcccacatcgg

SEQ ID NO: 9149 - DNA, 19 bp, Homo sapiens
gccggccgcccacatcggg

SEQ ID NO: 9150 - DNA, 19 bp, Homo sapiens
ccggccgcccacatcgggc

SEQ ID NO: 9151 - DNA, 19 bp, Homo sapiens
cggccgcccacatcgggct

SEQ ID NO: 9152 - DNA, 19 bp, Homo sapiens
ggccgcccacatcgggctc

SEQ ID NO: 9153 - DNA, 19 bp, Homo sapiens
gccgcccacatcgggctca

SEQ ID NO: 9154 - DNA, 19 bp, Homo sapiens
ccgcccacatcgggctcac

SEQ ID NO: 9155 - DNA, 19 bp, Homo sapiens
cgcccacatcgggctcacc

SEQ ID NO: 9156 - DNA, 19 bp, Homo sapiens
gcccacatcgggctcacct

SEQ ID NO: 9157 - DNA, 19 bp, Homo sapiens
cccacatcgggctcacctt

SEQ ID NO: 9158 - DNA, 19 bp, Homo sapiens
ccacatcgggctcacctta

SEQ ID NO: 9159 - DNA, 19 bp, Homo sapiens
cacatcgggctcaccttaa

SEQ ID NO: 9160 - DNA, 19 bp, Homo sapiens
acatcgggctcaccttaaa

SEQ ID NO: 9161 - DNA, 19 bp, Homo sapiens
catcgggctcaccttaaag

SEQ ID NO: 9162 - DNA, 19 bp, Homo sapiens
atcgggctcaccttaaagg

SEQ ID NO: 9163 - DNA, 19 bp, Homo sapiens
tcgggctcaccttaaaggt

SEQ ID NO: 9164 - DNA, 19 bp, Homo sapiens
cgggctcaccttaaaggtc

SEQ ID NO: 9165 - DNA, 19 bp, Homo sapiens
gggctcaccttaaaggtca

SEQ ID NO: 9166 - DNA, 19 bp, Homo sapiens
ggctcaccttaaaggtcaa

SEQ ID NO: 9167 - DNA, 19 bp, Homo sapiens
gctcaccttaaaggtcaag

SEQ ID NO: 9168 - DNA, 19 bp, Homo sapiens
ctcaccttaaaggtcaagg

SEQ ID NO: 9169 - DNA, 19 bp, Homo sapiens
tcaccttaaaggtcaagga

SEQ ID NO: 9170 - DNA, 19 bp, Homo sapiens
caccttaaaggtcaaggaa

SEQ ID NO: 9171 - DNA, 19 bp, Homo sapiens
accttaaaggtcaaggaag

SEQ ID NO: 9172 - DNA, 19 bp, Homo sapiens
ccttaaaggtcaaggaagg

SEQ ID NO: 9173 - DNA, 19 bp, Homo sapiens
cttaaaggtcaaggaagga

SEQ ID NO: 9174 - DNA, 19 bp, Homo sapiens
ttaaaggtcaaggaaggaa

SEQ ID NO: 9175 - DNA, 19 bp, Homo sapiens
taaaggtcaaggaaggaaa

SEQ ID NO: 9176 - DNA, 19 bp, Homo sapiens
aaaggtcaaggaaggaaaa

SEQ ID NO: 9177 - DNA, 19 bp, Homo sapiens
aaggtcaaggaaggaaaat

SEQ ID NO: 9178 - DNA, 19 bp, Homo sapiens
aggtcaaggaaggaaaata

SEQ ID NO: 9179 - DNA, 19 bp, Homo sapiens
ggtcaaggaaggaaaatac

SEQ ID NO: 9180 - DNA, 19 bp, Homo sapiens
gtcaaggaaggaaaatact

SEQ ID NO: 9181 - DNA, 19 bp, Homo sapiens
tcaaggaaggaaaatacta

SEQ ID NO: 9182 - DNA, 19 bp, Homo sapiens
caaggaaggaaaatactac

SEQ ID NO: 9183 - DNA, 19 bp, Homo sapiens
aaggaaggaaaatactacc

SEQ ID NO: 9184 - DNA, 19 bp, Homo sapiens
aggaaggaaaatactacct

SEQ ID NO: 9185 - DNA, 19 bp, Homo sapiens
ggaaggaaaatactacctg

SEQ ID NO: 9186 - DNA, 19 bp, Homo sapiens
gaaggaaaatactacctgt

SEQ ID NO: 9187 - DNA, 19 bp, Homo sapiens
aaggaaaatactacctgtc

SEQ ID NO: 9188 - DNA, 19 bp, Homo sapiens
aggaaaatactacctgtcc

SEQ ID NO: 9189 - DNA, 19 bp, Homo sapiens
ggaaaatactacctgtccc

SEQ ID NO: 9190 - DNA, 19 bp, Homo sapiens
gaaaatactacctgtcccc

SEQ ID NO: 9191 - DNA, 19 bp, Homo sapiens
aaaatactacctgtcccct

SEQ ID NO: 9192 - DNA, 19 bp, Homo sapiens
aaatactacctgtccccta

SEQ ID NO: 9193 - DNA, 19 bp, Homo sapiens
aatactacctgtcccctat

SEQ ID NO: 9194 - DNA, 19 bp, Homo sapiens
atactacctgtcccctatg

SEQ ID NO: 9195 - DNA, 19 bp, Homo sapiens
tactacctgtcccctatgc

SEQ ID NO: 9196 - DNA, 19 bp, Homo sapiens
actacctgtcccctatgcc

SEQ ID NO: 9197 - DNA, 19 bp, Homo sapiens
ctacctgtcccctatgcca

SEQ ID NO: 9198 - DNA, 19 bp, Homo sapiens
tacctgtcccctatgccac

SEQ ID NO: 9199 - DNA, 19 bp, Homo sapiens
acctgtcccctatgccact

SEQ ID NO: 9200 - DNA, 19 bp, Homo sapiens
cctgtcccctatgccacta

SEQ ID NO: 9201 - DNA, 19 bp, Homo sapiens
ctgtcccctatgccactaa

SEQ ID NO: 9202 - DNA, 19 bp, Homo sapiens
tgtcccctatgccactaag

SEQ ID NO: 9203 - DNA, 19 bp, Homo sapiens
gtcccctatgccactaagc

SEQ ID NO: 9204 - DNA, 19 bp, Homo sapiens
tcccctatgccactaagcc

SEQ ID NO: 9205 - DNA, 19 bp, Homo sapiens
cccctatgccactaagcca

SEQ ID NO: 9206 - DNA, 19 bp, Homo sapiens
ccctatgccactaagccaa

SEQ ID NO: 9207 - DNA, 19 bp, Homo sapiens
cctatgccactaagccaac

SEQ ID NO: 9208 - DNA, 19 bp, Homo sapiens
ctatgccactaagccaacg

SEQ ID NO: 9209 - DNA, 19 bp, Homo sapiens
tatgccactaagccaacgt

SEQ ID NO: 9210 - DNA, 19 bp, Homo sapiens
atgccactaagccaacgtg

SEQ ID NO: 9211 - DNA, 19 bp, Homo sapiens
tgccactaagccaacgtgt

SEQ ID NO: 9212 - DNA, 19 bp, Homo sapiens
gccactaagccaacgtgtg

SEQ ID NO: 9213 - DNA, 19 bp, Homo sapiens
ccactaagccaacgtgtgt

SEQ ID NO: 9214 - DNA, 19 bp, Homo sapiens
cactaagccaacgtgtgtg

SEQ ID NO: 9215 - DNA, 19 bp, Homo sapiens
actaagccaacgtgtgtgt

SEQ ID NO: 9216 - DNA, 19 bp, Homo sapiens
ctaagccaacgtgtgtgtc

SEQ ID NO: 9217 - DNA, 19 bp, Homo sapiens
taagccaacgtgtgtgtca

SEQ ID NO: 9218 - DNA, 19 bp, Homo sapiens
aagccaacgtgtgtgtcag

SEQ ID NO: 9219 - DNA, 19 bp, Homo sapiens
agccaacgtgtgtgtcagc

SEQ ID NO: 9220 - DNA, 19 bp, Homo sapiens
gccaacgtgtgtgtcagct

SEQ ID NO: 9221 - DNA, 19 bp, Homo sapiens
ccaacgtgtgtgtcagctg

SEQ ID NO: 9222 - DNA, 19 bp, Homo sapiens
caacgtgtgtgtcagctgg

SEQ ID NO: 9223 - DNA, 19 bp, Homo sapiens
aacgtgtgtgtcagctggt

SEQ ID NO: 9224 - DNA, 19 bp, Homo sapiens
acgtgtgtgtcagctggta

SEQ ID NO: 9225 - DNA, 19 bp, Homo sapiens
cgtgtgtgtcagctggtag

SEQ ID NO: 9226 - DNA, 19 bp, Homo sapiens
gtgtgtgtcagctggtagc

SEQ ID NO: 9227 - DNA, 19 bp, Homo sapiens
tgtgtgtcagctggtagct

SEQ ID NO: 9228 - DNA, 19 bp, Homo sapiens
gtgtgtcagctggtagctg

SEQ ID NO: 9229 - DNA, 19 bp, Homo sapiens
tgtgtcagctggtagctgg

SEQ ID NO: 9230 - DNA, 19 bp, Homo sapiens
gtgtcagctggtagctggg

SEQ ID NO: 9231 - DNA, 19 bp, Homo sapiens
tgtcagctggtagctgggg

SEQ ID NO: 9232 - DNA, 19 bp, Homo sapiens
gtcagctggtagctggggg

SEQ ID NO: 9233 - DNA, 19 bp, Homo sapiens
tcagctggtagctgggggc

SEQ ID NO: 9234 - DNA, 19 bp, Homo sapiens
cagctggtagctgggggcg

SEQ ID NO: 9235 - DNA, 19 bp, Homo sapiens
agctggtagctgggggcgc

SEQ ID NO: 9236 - DNA, 19 bp, Homo sapiens
gctggtagctgggggcgca

SEQ ID NO: 9237 - DNA, 19 bp, Homo sapiens
ctggtagctgggggcgcag

SEQ ID NO: 9238 - DNA, 19 bp, Homo sapiens
tggtagctgggggcgcaga

SEQ ID NO: 9239 - DNA, 19 bp, Homo sapiens
ggtagctgggggcgcagag

SEQ ID NO: 9240 - DNA, 19 bp, Homo sapiens
gtagctgggggcgcagagg

SEQ ID NO: 9241 - DNA, 19 bp, Homo sapiens
tagctgggggcgcagagga

SEQ ID NO: 9242 - DNA, 19 bp, Homo sapiens
agctgggggcgcagaggac

SEQ ID NO: 9243 - DNA, 19 bp, Homo sapiens
gctgggggcgcagaggaca

SEQ ID NO: 9244 - DNA, 19 bp, Homo sapiens
ctgggggcgcagaggacat

SEQ ID NO: 9245 - DNA, 19 bp, Homo sapiens
tgggggcgcagaggacatc

SEQ ID NO: 9246 - DNA, 19 bp, Homo sapiens
gggggcgcagaggacatca

SEQ ID NO: 9247 - DNA, 19 bp, Homo sapiens
ggggcgcagaggacatcac

SEQ ID NO: 9248 - DNA, 19 bp, Homo sapiens
gggcgcagaggacatcacc

SEQ ID NO: 9249 - DNA, 19 bp, Homo sapiens
ggcgcagaggacatcacct

SEQ ID NO: 9250 - DNA, 19 bp, Homo sapiens
gcgcagaggacatcacctg

SEQ ID NO: 9251 - DNA, 19 bp, Homo sapiens
cgcagaggacatcacctgg

SEQ ID NO: 9252 - DNA, 19 bp, Homo sapiens
gcagaggacatcacctggg

SEQ ID NO: 9253 - DNA, 19 bp, Homo sapiens
cagaggacatcacctgggg

SEQ ID NO: 9254 - DNA, 19 bp, Homo sapiens
agaggacatcacctggggt

SEQ ID NO: 9255 - DNA, 19 bp, Homo sapiens
gaggacatcacctggggtg

SEQ ID NO: 9256 - DNA, 19 bp, Homo sapiens
aggacatcacctggggtgc

SEQ ID NO: 9257 - DNA, 19 bp, Homo sapiens
ggacatcacctggggtgct

SEQ ID NO: 9258 - DNA, 19 bp, Homo sapiens
gacatcacctggggtgctg

SEQ ID NO: 9259 - DNA, 19 bp, Homo sapiens
acatcacctggggtgctgc

SEQ ID NO: 9260 - DNA, 19 bp, Homo sapiens
catcacctggggtgctgcc

SEQ ID NO: 9261 - DNA, 19 bp, Homo sapiens
atcacctggggtgctgcct

SEQ ID NO: 9262 - DNA, 19 bp, Homo sapiens
tcacctggggtgctgcctc

SEQ ID NO: 9263 - DNA, 19 bp, Homo sapiens
cacctggggtgctgcctct

SEQ ID NO: 9264 - DNA, 19 bp, Homo sapiens
acctggggtgctgcctctc

SEQ ID NO: 9265 - DNA, 19 bp, Homo sapiens
cctggggtgctgcctctca

SEQ ID NO: 9266 - DNA, 19 bp, Homo sapiens
ctggggtgctgcctctcac

SEQ ID NO: 9267 - DNA, 19 bp, Homo sapiens
tggggtgctgcctctcaca

SEQ ID NO: 9268 - DNA, 19 bp, Homo sapiens
ggggtgctgcctctcacac

SEQ ID NO: 9269 - DNA, 19 bp, Homo sapiens
gggtgctgcctctcacaca

SEQ ID NO: 9270 - DNA, 19 bp, Homo sapiens
ggtgctgcctctcacacat

SEQ ID NO: 9271 - DNA, 19 bp, Homo sapiens
gtgctgcctctcacacatt

SEQ ID NO: 9272 - DNA, 19 bp, Homo sapiens
tgctgcctctcacacattt

SEQ ID NO: 9273 - DNA, 19 bp, Homo sapiens
gctgcctctcacacatttc

SEQ ID NO: 9274 - DNA, 19 bp, Homo sapiens
ctgcctctcacacatttct

SEQ ID NO: 9275 - DNA, 19 bp, Homo sapiens
tgcctctcacacatttctg

SEQ ID NO: 9276 - DNA, 19 bp, Homo sapiens
gcctctcacacatttctgc

SEQ ID NO: 9277 - DNA, 19 bp, Homo sapiens
cctctcacacatttctgcc

SEQ ID NO: 9278 - DNA, 19 bp, Homo sapiens
ctctcacacatttctgcca

SEQ ID NO: 9279 - DNA, 19 bp, Homo sapiens
tctcacacatttctgccac

SEQ ID NO: 9280 - DNA, 19 bp, Homo sapiens
ctcacacatttctgccacg

SEQ ID NO: 9281 - DNA, 19 bp, Homo sapiens
tcacacatttctgccacgt

SEQ ID NO: 9282 - DNA, 19 bp, Homo sapiens
cacacatttctgccacgtg

SEQ ID NO: 9283 - DNA, 19 bp, Homo sapiens
acacatttctgccacgtgg

SEQ ID NO: 9284 - DNA, 19 bp, Homo sapiens
cacatttctgccacgtggt

SEQ ID NO: 9285 - DNA, 19 bp, Homo sapiens
acatttctgccacgtggtg

SEQ ID NO: 9286 - DNA, 19 bp, Homo sapiens
catttctgccacgtggtgg

SEQ ID NO: 9287 - DNA, 19 bp, Homo sapiens
atttctgccacgtggtggc

SEQ ID NO: 9288 - DNA, 19 bp, Homo sapiens
tttctgccacgtggtggcc

SEQ ID NO: 9289 - DNA, 19 bp, Homo sapiens
ttctgccacgtggtggccc

SEQ ID NO: 9290 - DNA, 19 bp, Homo sapiens
tctgccacgtggtggccca

SEQ ID NO: 9291 - DNA, 19 bp, Homo sapiens
ctgccacgtggtggcccag

SEQ ID NO: 9292 - DNA, 19 bp, Homo sapiens
tgccacgtggtggcccagc

SEQ ID NO: 9293 - DNA, 19 bp, Homo sapiens
gccacgtggtggcccagct

SEQ ID NO: 9294 - DNA, 19 bp, Homo sapiens
ccacgtggtggcccagctc

SEQ ID NO: 9295 - DNA, 19 bp, Homo sapiens
cacgtggtggcccagctcc

SEQ ID NO: 9296 - DNA, 19 bp, Homo sapiens
acgtggtggcccagctcct

SEQ ID NO: 9297 - DNA, 19 bp, Homo sapiens
cgtggtggcccagctcctc

SEQ ID NO: 9298 - DNA, 19 bp, Homo sapiens
gtggtggcccagctcctca

SEQ ID NO: 9299 - DNA, 19 bp, Homo sapiens
tggtggcccagctcctcac

SEQ ID NO: 9300 - DNA, 19 bp, Homo sapiens
ggtggcccagctcctcacc

SEQ ID NO: 9301 - DNA, 19 bp, Homo sapiens
gtggcccagctcctcaccc

SEQ ID NO: 9302 - DNA, 19 bp, Homo sapiens
tggcccagctcctcaccca

SEQ ID NO: 9303 - DNA, 19 bp, Homo sapiens
ggcccagctcctcacccag

SEQ ID NO: 9304 - DNA, 19 bp, Homo sapiens
gcccagctcctcacccagg

SEQ ID NO: 9305 - DNA, 19 bp, Homo sapiens
cccagctcctcacccaggg

SEQ ID NO: 9306 - DNA, 19 bp, Homo sapiens
ccagctcctcacccagggc

SEQ ID NO: 9307 - DNA, 19 bp, Homo sapiens
cagctcctcacccagggcc

SEQ ID NO: 9308 - DNA, 19 bp, Homo sapiens
agctcctcacccagggccc

SEQ ID NO: 9309 - DNA, 19 bp, Homo sapiens
gctcctcacccagggcccc

SEQ ID NO: 9310 - DNA, 19 bp, Homo sapiens
ctcctcacccagggccccc

SEQ ID NO: 9311 - DNA, 19 bp, Homo sapiens
tcctcacccagggccccca

SEQ ID NO: 9312 - DNA, 19 bp, Homo sapiens
cctcacccagggcccccaa

SEQ ID NO: 9313 - DNA, 19 bp, Homo sapiens
ctcacccagggcccccaaa

SEQ ID NO: 9314 - DNA, 19 bp, Homo sapiens
tcacccagggcccccaaag

SEQ ID NO: 9315 - DNA, 19 bp, Homo sapiens
cacccagggcccccaaaga

SEQ ID NO: 9316 - DNA, 19 bp, Homo sapiens
acccagggcccccaaagag

SEQ ID NO: 9317 - DNA, 19 bp, Homo sapiens
cccagggcccccaaagagc

SEQ ID NO: 9318 - DNA, 19 bp, Homo sapiens
ccagggcccccaaagagca

SEQ ID NO: 9319 - DNA, 19 bp, Homo sapiens
cagggcccccaaagagcaa

SEQ ID NO: 9320 - DNA, 19 bp, Homo sapiens
agggcccccaaagagcaag

SEQ ID NO: 9321 - DNA, 19 bp, Homo sapiens
gggcccccaaagagcaagc

SEQ ID NO: 9322 - DNA, 19 bp, Homo sapiens
ggcccccaaagagcaagcg

SEQ ID NO: 9323 - DNA, 19 bp, Homo sapiens
gcccccaaagagcaagcgt

SEQ ID NO: 9324 - DNA, 19 bp, Homo sapiens
cccccaaagagcaagcgtc

SEQ ID NO: 9325 - DNA, 19 bp, Homo sapiens
ccccaaagagcaagcgtct

SEQ ID NO: 9326 - DNA, 19 bp, Homo sapiens
cccaaagagcaagcgtctg

SEQ ID NO: 9327 - DNA, 19 bp, Homo sapiens
ccaaagagcaagcgtctgg

SEQ ID NO: 9328 - DNA, 19 bp, Homo sapiens
caaagagcaagcgtctggg

SEQ ID NO: 9329 - DNA, 19 bp, Homo sapiens
aaagagcaagcgtctgggc

SEQ ID NO: 9330 - DNA, 19 bp, Homo sapiens
aagagcaagcgtctgggca

SEQ ID NO: 9331 - DNA, 19 bp, Homo sapiens
agagcaagcgtctgggcaa

SEQ ID NO: 9332 - DNA, 19 bp, Homo sapiens
gagcaagcgtctgggcaag

SEQ ID NO: 9333 - DNA, 19 bp, Homo sapiens
agcaagcgtctgggcaaga

SEQ ID NO: 9334 - DNA, 19 bp, Homo sapiens
gcaagcgtctgggcaagag

SEQ ID NO: 9335 - DNA, 19 bp, Homo sapiens
caagcgtctgggcaagagg

SEQ ID NO: 9336 - DNA, 19 bp, Homo sapiens
aagcgtctgggcaagagga

SEQ ID NO: 9337 - DNA, 19 bp, Homo sapiens
agcgtctgggcaagaggaa

SEQ ID NO: 9338 - DNA, 19 bp, Homo sapiens
gcgtctgggcaagaggaaa

SEQ ID NO: 9339 - DNA, 19 bp, Homo sapiens
cgtctgggcaagaggaaaa

SEQ ID NO: 9340 - DNA, 19 bp, Homo sapiens
gtctgggcaagaggaaaat

SEQ ID NO: 9341 - DNA, 19 bp, Homo sapiens
tctgggcaagaggaaaatg

SEQ ID NO: 9342 - DNA, 19 bp, Homo sapiens
ctgggcaagaggaaaatgc

SEQ ID NO: 9343 - DNA, 19 bp, Homo sapiens
tgggcaagaggaaaatgcc

SEQ ID NO: 9344 - DNA, 19 bp, Homo sapiens
gggcaagaggaaaatgccc

SEQ ID NO: 9345 - DNA, 19 bp, Homo sapiens
ggcaagaggaaaatgccct

SEQ ID NO: 9346 - DNA, 19 bp, Homo sapiens
gcaagaggaaaatgccctg

SEQ ID NO: 9347 - DNA, 19 bp, Homo sapiens
caagaggaaaatgccctgt

SEQ ID NO: 9348 - DNA, 19 bp, Homo sapiens
aagaggaaaatgccctgtc

SEQ ID NO: 9349 - DNA, 19 bp, Homo sapiens
agaggaaaatgccctgtcc

SEQ ID NO: 9350 - DNA, 19 bp, Homo sapiens
gaggaaaatgccctgtccc

SEQ ID NO: 9351 - DNA, 19 bp, Homo sapiens
aggaaaatgccctgtccct

SEQ ID NO: 9352 - DNA, 19 bp, Homo sapiens
ggaaaatgccctgtcccta

SEQ ID NO: 9353 - DNA, 19 bp, Homo sapiens
gaaaatgccctgtccctag

SEQ ID NO: 9354 - DNA, 19 bp, Homo sapiens
aaaatgccctgtccctagc

SEQ ID NO: 9355 - DNA, 19 bp, Homo sapiens
aaatgccctgtccctagct

SEQ ID NO: 9356 - DNA, 19 bp, Homo sapiens
aatgccctgtccctagctc

SEQ ID NO: 9357 - DNA, 19 bp, Homo sapiens
atgccctgtccctagctca

SEQ ID NO: 9358 - DNA, 19 bp, Homo sapiens
tgccctgtccctagctcac

SEQ ID NO: 9359 - DNA, 19 bp, Homo sapiens
gccctgtccctagctcaca

SEQ ID NO: 9360 - DNA, 19 bp, Homo sapiens
ccctgtccctagctcacac

SEQ ID NO: 9361 - DNA, 19 bp, Homo sapiens
cctgtccctagctcacact

SEQ ID NO: 9362 - DNA, 19 bp, Homo sapiens
ctgtccctagctcacactc

SEQ ID NO: 9363 - DNA, 19 bp, Homo sapiens
tgtccctagctcacactca

SEQ ID NO: 9364 - DNA, 19 bp, Homo sapiens
gtccctagctcacactcat

SEQ ID NO: 9365 - DNA, 19 bp, Homo sapiens
tccctagctcacactcatc

SEQ ID NO: 9366 - DNA, 19 bp, Homo sapiens
ccctagctcacactcatcc

SEQ ID NO: 9367 - DNA, 19 bp, Homo sapiens
cctagctcacactcatcca

SEQ ID NO: 9368 - DNA, 19 bp, Homo sapiens
ctagctcacactcatccac

SEQ ID NO: 9369 - DNA, 19 bp, Homo sapiens
tagctcacactcatccaca

SEQ ID NO: 9370 - DNA, 19 bp, Homo sapiens
agctcacactcatccacac

SEQ ID NO: 9371 - DNA, 19 bp, Homo sapiens
gctcacactcatccacact

SEQ ID NO: 9372 - DNA, 19 bp, Homo sapiens
ctcacactcatccacactt

SEQ ID NO: 9373 - DNA, 19 bp, Homo sapiens
tcacactcatccacactta

SEQ ID NO: 9374 - DNA, 19 bp, Homo sapiens
cacactcatccacacttaa

SEQ ID NO: 9375 - DNA, 19 bp, Homo sapiens
acactcatccacacttaag

SEQ ID NO: 9376 - DNA, 19 bp, Homo sapiens
cactcatccacacttaagc

SEQ ID NO: 9377 - DNA, 19 bp, Homo sapiens
actcatccacacttaagcc

SEQ ID NO: 9378 - DNA, 19 bp, Homo sapiens
ctcatccacacttaagccc

SEQ ID NO: 9379 - DNA, 19 bp, Homo sapiens
tcatccacacttaagccct

SEQ ID NO: 9380 - DNA, 19 bp, Homo sapiens
catccacacttaagccctc

SEQ ID NO: 9381 - DNA, 19 bp, Homo sapiens
atccacacttaagccctcg

SEQ ID NO: 9382 - DNA, 19 bp, Homo sapiens
tccacacttaagccctcgt

SEQ ID NO: 9383 - DNA, 19 bp, Homo sapiens
ccacacttaagccctcgtg

SEQ ID NO: 9384 - DNA, 19 bp, Homo sapiens
cacacttaagccctcgtgc

SEQ ID NO: 9385 - DNA, 19 bp, Homo sapiens
acacttaagccctcgtgca

SEQ ID NO: 9386 - DNA, 19 bp, Homo sapiens
cacttaagccctcgtgcac

SEQ ID NO: 9387 - DNA, 19 bp, Homo sapiens
acttaagccctcgtgcaca

SEQ ID NO: 9388 - DNA, 19 bp, Homo sapiens
cttaagccctcgtgcacac

SEQ ID NO: 9389 - DNA, 19 bp, Homo sapiens
ttaagccctcgtgcacaca

SEQ ID NO: 9390 - DNA, 19 bp, Homo sapiens
taagccctcgtgcacacac

SEQ ID NO: 9391 - DNA, 19 bp, Homo sapiens
aagccctcgtgcacacaca

SEQ ID NO: 9392 - DNA, 19 bp, Homo sapiens
agccctcgtgcacacacac

SEQ ID NO: 9393 - DNA, 19 bp, Homo sapiens
gccctcgtgcacacacaca

SEQ ID NO: 9394 - DNA, 19 bp, Homo sapiens
ccctcgtgcacacacacaa

SEQ ID NO: 9395 - DNA, 19 bp, Homo sapiens
cctcgtgcacacacacaaa

SEQ ID NO: 9396 - DNA, 19 bp, Homo sapiens
ctcgtgcacacacacaaat

SEQ ID NO: 9397 - DNA, 19 bp, Homo sapiens
tcgtgcacacacacaaatt

SEQ ID NO: 9398 - DNA, 19 bp, Homo sapiens
cgtgcacacacacaaatta

SEQ ID NO: 9399 - DNA, 19 bp, Homo sapiens
gtgcacacacacaaattat

SEQ ID NO: 9400 - DNA, 19 bp, Homo sapiens
tgcacacacacaaattatt

SEQ ID NO: 9401 - DNA, 19 bp, Homo sapiens
gcacacacacaaattattc

SEQ ID NO: 9402 - DNA, 19 bp, Homo sapiens
cacacacacaaattattca

SEQ ID NO: 9403 - DNA, 19 bp, Homo sapiens
acacacacaaattattcag

SEQ ID NO: 9404 - DNA, 19 bp, Homo sapiens
cacacacaaattattcaga

SEQ ID NO: 9405 - DNA, 19 bp, Homo sapiens
acacacaaattattcagat

SEQ ID NO: 9406 - DNA, 19 bp, Homo sapiens
cacacaaattattcagatg

SEQ ID NO: 9407 - DNA, 19 bp, Homo sapiens
acacaaattattcagatgt

SEQ ID NO: 9408 - DNA, 19 bp, Homo sapiens
cacaaattattcagatgta

SEQ ID NO: 9409 - DNA, 19 bp, Homo sapiens
acaaattattcagatgtac

SEQ ID NO: 9410 - DNA, 19 bp, Homo sapiens
caaattattcagatgtaca

SEQ ID NO: 9411 - DNA, 19 bp, Homo sapiens
aaattattcagatgtacac

SEQ ID NO: 9412 - DNA, 19 bp, Homo sapiens
aattattcagatgtacacc

SEQ ID NO: 9413 - DNA, 19 bp, Homo sapiens
attattcagatgtacaccc

SEQ ID NO: 9414 - DNA, 19 bp, Homo sapiens
ttattcagatgtacaccca

SEQ ID NO: 9415 - DNA, 19 bp, Homo sapiens
tattcagatgtacacccac

SEQ ID NO: 9416 - DNA, 19 bp, Homo sapiens
attcagatgtacacccacc

SEQ ID NO: 9417 - DNA, 19 bp, Homo sapiens
ttcagatgtacacccaccc

SEQ ID NO: 9418 - DNA, 19 bp, Homo sapiens
tcagatgtacacccaccca

SEQ ID NO: 9419 - DNA, 19 bp, Homo sapiens
cagatgtacacccacccac

SEQ ID NO: 9420 - DNA, 19 bp, Homo sapiens
agatgtacacccacccaca

SEQ ID NO: 9421 - DNA, 19 bp, Homo sapiens
gatgtacacccacccacat

SEQ ID NO: 9422 - DNA, 19 bp, Homo sapiens
atgtacacccacccacata

SEQ ID NO: 9423 - DNA, 19 bp, Homo sapiens
tgtacacccacccacatat

SEQ ID NO: 9424 - DNA, 19 bp, Homo sapiens
gtacacccacccacatatc

SEQ ID NO: 9425 - DNA, 19 bp, Homo sapiens
tacacccacccacatatct

SEQ ID NO: 9426 - DNA, 19 bp, Homo sapiens
acacccacccacatatctt

SEQ ID NO: 9427 - DNA, 19 bp, Homo sapiens
cacccacccacatatctta

SEQ ID NO: 9428 - DNA, 19 bp, Homo sapiens
acccacccacatatcttac

SEQ ID NO: 9429 - DNA, 19 bp, Homo sapiens
cccacccacatatcttaca

SEQ ID NO: 9430 - DNA, 19 bp, Homo sapiens
ccacccacatatcttacag

SEQ ID NO: 9431 - DNA, 19 bp, Homo sapiens
cacccacatatcttacagc

SEQ ID NO: 9432 - DNA, 19 bp, Homo sapiens
acccacatatcttacagcc

SEQ ID NO: 9433 - DNA, 19 bp, Homo sapiens
cccacatatcttacagcca

SEQ ID NO: 9434 - DNA, 19 bp, Homo sapiens
ccacatatcttacagccag

SEQ ID NO: 9435 - DNA, 19 bp, Homo sapiens
cacatatcttacagccaga

SEQ ID NO: 9436 - DNA, 19 bp, Homo sapiens
acatatcttacagccagag

SEQ ID NO: 9437 - DNA, 19 bp, Homo sapiens
catatcttacagccagagg

SEQ ID NO: 9438 - DNA, 19 bp, Homo sapiens
atatcttacagccagagga

SEQ ID NO: 9439 - DNA, 19 bp, Homo sapiens
tatcttacagccagaggaa

SEQ ID NO: 9440 - DNA, 19 bp, Homo sapiens
atcttacagccagaggaac

SEQ ID NO: 9441 - DNA, 19 bp, Homo sapiens
tcttacagccagaggaacc

SEQ ID NO: 9442 - DNA, 19 bp, Homo sapiens
cttacagccagaggaacca

SEQ ID NO: 9443 - DNA, 19 bp, Homo sapiens
ttacagccagaggaaccag

SEQ ID NO: 9444 - DNA, 19 bp, Homo sapiens
tacagccagaggaaccagc

SEQ ID NO: 9445 - DNA, 19 bp, Homo sapiens
acagccagaggaaccagca

SEQ ID NO: 9446 - DNA, 19 bp, Homo sapiens
cagccagaggaaccagcac

SEQ ID NO: 9447 - DNA, 19 bp, Homo sapiens
agccagaggaaccagcact

SEQ ID NO: 9448 - DNA, 19 bp, Homo sapiens
gccagaggaaccagcactc

SEQ ID NO: 9449 - DNA, 19 bp, Homo sapiens
ccagaggaaccagcactcc

SEQ ID NO: 9450 - DNA, 19 bp, Homo sapiens
cagaggaaccagcactcca

SEQ ID NO: 9451 - DNA, 19 bp, Homo sapiens
agaggaaccagcactccat

SEQ ID NO: 9452 - DNA, 19 bp, Homo sapiens
gaggaaccagcactccatc

SEQ ID NO: 9453 - DNA, 19 bp, Homo sapiens
aggaaccagcactccatca

SEQ ID NO: 9454 - DNA, 19 bp, Homo sapiens
ggaaccagcactccatcac

SEQ ID NO: 9455 - DNA, 19 bp, Homo sapiens
gaaccagcactccatcact

SEQ ID NO: 9456 - DNA, 19 bp, Homo sapiens
aaccagcactccatcactg

SEQ ID NO: 9457 - DNA, 19 bp, Homo sapiens
accagcactccatcactga

SEQ ID NO: 9458 - DNA, 19 bp, Homo sapiens
ccagcactccatcactgag

SEQ ID NO: 9459 - DNA, 19 bp, Homo sapiens
cagcactccatcactgaga

SEQ ID NO: 9460 - DNA, 19 bp, Homo sapiens
agcactccatcactgagag

SEQ ID NO: 9461 - DNA, 19 bp, Homo sapiens
gcactccatcactgagagc

SEQ ID NO: 9462 - DNA, 19 bp, Homo sapiens
cactccatcactgagagcc

SEQ ID NO: 9463 - DNA, 19 bp, Homo sapiens
actccatcactgagagccc

SEQ ID NO: 9464 - DNA, 19 bp, Homo sapiens
ctccatcactgagagcccg

SEQ ID NO: 9465 - DNA, 19 bp, Homo sapiens
tccatcactgagagcccga

SEQ ID NO: 9466 - DNA, 19 bp, Homo sapiens
ccatcactgagagcccgac

SEQ ID NO: 9467 - DNA, 19 bp, Homo sapiens
catcactgagagcccgact

SEQ ID NO: 9468 - DNA, 19 bp, Homo sapiens
atcactgagagcccgactt

SEQ ID NO: 9469 - DNA, 19 bp, Homo sapiens
tcactgagagcccgacttc

SEQ ID NO: 9470 - DNA, 19 bp, Homo sapiens
cactgagagcccgacttcg

SEQ ID NO: 9471 - DNA, 19 bp, Homo sapiens
actgagagcccgacttcgt

SEQ ID NO: 9472 - DNA, 19 bp, Homo sapiens
ctgagagcccgacttcgtt

SEQ ID NO: 9473 - DNA, 19 bp, Homo sapiens
tgagagcccgacttcgttt

SEQ ID NO: 9474 - DNA, 19 bp, Homo sapiens
gagagcccgacttcgtttc

SEQ ID NO: 9475 - DNA, 19 bp, Homo sapiens
agagcccgacttcgtttct

SEQ ID NO: 9476 - DNA, 19 bp, Homo sapiens
gagcccgacttcgtttctg

SEQ ID NO: 9477 - DNA, 19 bp, Homo sapiens
agcccgacttcgtttctgg

SEQ ID NO: 9478 - DNA, 19 bp, Homo sapiens
gcccgacttcgtttctggg

SEQ ID NO: 9479 - DNA, 19 bp, Homo sapiens
cccgacttcgtttctgggg

SEQ ID NO: 9480 - DNA, 19 bp, Homo sapiens
ccgacttcgtttctggggc

SEQ ID NO: 9481 - DNA, 19 bp, Homo sapiens
cgacttcgtttctggggca

SEQ ID NO: 9482 - DNA, 19 bp, Homo sapiens
gacttcgtttctggggcaa

SEQ ID NO: 9483 - DNA, 19 bp, Homo sapiens
acttcgtttctggggcaac

SEQ ID NO: 9484 - DNA, 19 bp, Homo sapiens
cttcgtttctggggcaact

SEQ ID NO: 9485 - DNA, 19 bp, Homo sapiens
ttcgtttctggggcaactg

SEQ ID NO: 9486 - DNA, 19 bp, Homo sapiens
tcgtttctggggcaactga

SEQ ID NO: 9487 - DNA, 19 bp, Homo sapiens
cgtttctggggcaactgag

SEQ ID NO: 9488 - DNA, 19 bp, Homo sapiens
gtttctggggcaactgaga

SEQ ID NO: 9489 - DNA, 19 bp, Homo sapiens
tttctggggcaactgagag

SEQ ID NO: 9490 - DNA, 19 bp, Homo sapiens
ttctggggcaactgagagc

SEQ ID NO: 9491 - DNA, 19 bp, Homo sapiens
tctggggcaactgagagct

SEQ ID NO: 9492 - DNA, 19 bp, Homo sapiens
ctggggcaactgagagctg

SEQ ID NO: 9493 - DNA, 19 bp, Homo sapiens
tggggcaactgagagctga

SEQ ID NO: 9494 - DNA, 19 bp, Homo sapiens
ggggcaactgagagctgag

SEQ ID NO: 9495 - DNA, 19 bp, Homo sapiens
gggcaactgagagctgagc

SEQ ID NO: 9496 - DNA, 19 bp, Homo sapiens
ggcaactgagagctgagcg

SEQ ID NO: 9497 - DNA, 19 bp, Homo sapiens
gcaactgagagctgagcgc

SEQ ID NO: 9498 - DNA, 19 bp, Homo sapiens
caactgagagctgagcgct

SEQ ID NO: 9499 - DNA, 19 bp, Homo sapiens
aactgagagctgagcgctt

SEQ ID NO: 9500 - DNA, 19 bp, Homo sapiens
actgagagctgagcgcttt

SEQ ID NO: 9501 - DNA, 19 bp, Homo sapiens
ctgagagctgagcgctttg

SEQ ID NO: 9502 - DNA, 19 bp, Homo sapiens
tgagagctgagcgctttgc

SEQ ID NO: 9503 - DNA, 19 bp, Homo sapiens
gagagctgagcgctttgct

SEQ ID NO: 9504 - DNA, 19 bp, Homo sapiens
agagctgagcgctttgctt

SEQ ID NO: 9505 - DNA, 19 bp, Homo sapiens
gagctgagcgctttgctta

SEQ ID NO: 9506 - DNA, 19 bp, Homo sapiens
agctgagcgctttgcttac

SEQ ID NO: 9507 - DNA, 19 bp, Homo sapiens
gctgagcgctttgcttacc

SEQ ID NO: 9508 - DNA, 19 bp, Homo sapiens
ctgagcgctttgcttacca

SEQ ID NO: 9509 - DNA, 19 bp, Homo sapiens
tgagcgctttgcttaccaa

SEQ ID NO: 9510 - DNA, 19 bp, Homo sapiens
gagcgctttgcttaccaaa

SEQ ID NO: 9511 - DNA, 19 bp, Homo sapiens
agcgctttgcttaccaaaa

SEQ ID NO: 9512 - DNA, 19 bp, Homo sapiens
gcgctttgcttaccaaaag

SEQ ID NO: 9513 - DNA, 19 bp, Homo sapiens
cgctttgcttaccaaaagc

SEQ ID NO: 9514 - DNA, 19 bp, Homo sapiens
gctttgcttaccaaaagct

SEQ ID NO: 9515 - DNA, 19 bp, Homo sapiens
ctttgcttaccaaaagctc

SEQ ID NO: 9516 - DNA, 19 bp, Homo sapiens
tttgcttaccaaaagctca

SEQ ID NO: 9517 - DNA, 19 bp, Homo sapiens
ttgcttaccaaaagctcag

SEQ ID NO: 9518 - DNA, 19 bp, Homo sapiens
tgcttaccaaaagctcagg

SEQ ID NO: 9519 - DNA, 19 bp, Homo sapiens
gcttaccaaaagctcaggg

SEQ ID NO: 9520 - DNA, 19 bp, Homo sapiens
cttaccaaaagctcagggc

SEQ ID NO: 9521 - DNA, 19 bp, Homo sapiens
ttaccaaaagctcagggcc

SEQ ID NO: 9522 - DNA, 19 bp, Homo sapiens
taccaaaagctcagggccc

SEQ ID NO: 9523 - DNA, 19 bp, Homo sapiens
accaaaagctcagggccct

SEQ ID NO: 9524 - DNA, 19 bp, Homo sapiens
ccaaaagctcagggccctg

SEQ ID NO: 9525 - DNA, 19 bp, Homo sapiens
caaaagctcagggccctgt

SEQ ID NO: 9526 - DNA, 19 bp, Homo sapiens
aaaagctcagggccctgtg

SEQ ID NO: 9527 - DNA, 19 bp, Homo sapiens
aaagctcagggccctgtgc

SEQ ID NO: 9528 - DNA, 19 bp, Homo sapiens
aagctcagggccctgtgcc

SEQ ID NO: 9529 - DNA, 19 bp, Homo sapiens
agctcagggccctgtgcca

SEQ ID NO: 9530 - DNA, 19 bp, Homo sapiens
gctcagggccctgtgccag

SEQ ID NO: 9531 - DNA, 19 bp, Homo sapiens
ctcagggccctgtgccagg

SEQ ID NO: 9532 - DNA, 19 bp, Homo sapiens
tcagggccctgtgccaggc

SEQ ID NO: 9533 - DNA, 19 bp, Homo sapiens
cagggccctgtgccaggcc

SEQ ID NO: 9534 - DNA, 19 bp, Homo sapiens
agggccctgtgccaggcca

SEQ ID NO: 9535 - DNA, 19 bp, Homo sapiens
gggccctgtgccaggccaa

SEQ ID NO: 9536 - DNA, 19 bp, Homo sapiens
ggccctgtgccaggccaaa

SEQ ID NO: 9537 - DNA, 19 bp, Homo sapiens
gccctgtgccaggccaaag

SEQ ID NO: 9538 - DNA, 19 bp, Homo sapiens
ccctgtgccaggccaaaga

SEQ ID NO: 9539 - DNA, 19 bp, Homo sapiens
cctgtgccaggccaaagat

SEQ ID NO: 9540 - DNA, 19 bp, Homo sapiens
ctgtgccaggccaaagatc

SEQ ID NO: 9541 - DNA, 19 bp, Homo sapiens
tgtgccaggccaaagatcc

SEQ ID NO: 9542 - DNA, 19 bp, Homo sapiens
gtgccaggccaaagatccc

SEQ ID NO: 9543 - DNA, 19 bp, Homo sapiens
tgccaggccaaagatcccc

SEQ ID NO: 9544 - DNA, 19 bp, Homo sapiens
gccaggccaaagatccccc

SEQ ID NO: 9545 - DNA, 19 bp, Homo sapiens
ccaggccaaagatcccccc

SEQ ID NO: 9546 - DNA, 19 bp, Homo sapiens
caggccaaagatcccccca

SEQ ID NO: 9547 - DNA, 19 bp, Homo sapiens
aggccaaagatccccccag

SEQ ID NO: 9548 - DNA, 19 bp, Homo sapiens
ggccaaagatccccccaga

SEQ ID NO: 9549 - DNA, 19 bp, Homo sapiens
gccaaagatccccccagac

SEQ ID NO: 9550 - DNA, 19 bp, Homo sapiens
ccaaagatccccccagacc

SEQ ID NO: 9551 - DNA, 19 bp, Homo sapiens
caaagatccccccagaccc

SEQ ID NO: 9552 - DNA, 19 bp, Homo sapiens
aaagatccccccagacccc

SEQ ID NO: 9553 - DNA, 19 bp, Homo sapiens
aagatccccccagaccccc

SEQ ID NO: 9554 - DNA, 19 bp, Homo sapiens
agatccccccagaccccca

SEQ ID NO: 9555 - DNA, 19 bp, Homo sapiens
gatccccccagacccccat

SEQ ID NO: 9556 - DNA, 19 bp, Homo sapiens
atccccccagacccccatt

SEQ ID NO: 9557 - DNA, 19 bp, Homo sapiens
tccccccagacccccattc

SEQ ID NO: 9558 - DNA, 19 bp, Homo sapiens
ccccccagacccccattct

SEQ ID NO: 9559 - DNA, 19 bp, Homo sapiens
cccccagacccccattctg

SEQ ID NO: 9560 - DNA, 19 bp, Homo sapiens
ccccagacccccattctga

SEQ ID NO: 9561 - DNA, 19 bp, Homo sapiens
cccagacccccattctgac

SEQ ID NO: 9562 - DNA, 19 bp, Homo sapiens
ccagacccccattctgaca

SEQ ID NO: 9563 - DNA, 19 bp, Homo sapiens
cagacccccattctgacat

SEQ ID NO: 9564 - DNA, 19 bp, Homo sapiens
agacccccattctgacatc

SEQ ID NO: 9565 - DNA, 19 bp, Homo sapiens
gacccccattctgacatcc

SEQ ID NO: 9566 - DNA, 19 bp, Homo sapiens
acccccattctgacatcca

SEQ ID NO: 9567 - DNA, 19 bp, Homo sapiens
cccccattctgacatccac

SEQ ID NO: 9568 - DNA, 19 bp, Homo sapiens
ccccattctgacatccaca

SEQ ID NO: 9569 - DNA, 19 bp, Homo sapiens
cccattctgacatccacat

SEQ ID NO: 9570 - DNA, 19 bp, Homo sapiens
ccattctgacatccacatg

SEQ ID NO: 9571 - DNA, 19 bp, Homo sapiens
cattctgacatccacatgc

SEQ ID NO: 9572 - DNA, 19 bp, Homo sapiens
attctgacatccacatgct

SEQ ID NO: 9573 - DNA, 19 bp, Homo sapiens
ttctgacatccacatgctc

SEQ ID NO: 9574 - DNA, 19 bp, Homo sapiens
tctgacatccacatgctct

SEQ ID NO: 9575 - DNA, 19 bp, Homo sapiens
ctgacatccacatgctctg

SEQ ID NO: 9576 - DNA, 19 bp, Homo sapiens
tgacatccacatgctctgc

SEQ ID NO: 9577 - DNA, 19 bp, Homo sapiens
gacatccacatgctctgca

SEQ ID NO: 9578 - DNA, 19 bp, Homo sapiens
acatccacatgctctgcag

SEQ ID NO: 9579 - DNA, 19 bp, Homo sapiens
catccacatgctctgcagt

SEQ ID NO: 9580 - DNA, 19 bp, Homo sapiens
atccacatgctctgcagtc

SEQ ID NO: 9581 - DNA, 19 bp, Homo sapiens
tccacatgctctgcagtcc

SEQ ID NO: 9582 - DNA, 19 bp, Homo sapiens
ccacatgctctgcagtcct

SEQ ID NO: 9583 - DNA, 19 bp, Homo sapiens
cacatgctctgcagtcctg

SEQ ID NO: 9584 - DNA, 19 bp, Homo sapiens
acatgctctgcagtcctgg

SEQ ID NO: 9585 - DNA, 19 bp, Homo sapiens
catgctctgcagtcctggc

SEQ ID NO: 9586 - DNA, 19 bp, Homo sapiens
atgctctgcagtcctggcc

SEQ ID NO: 9587 - DNA, 19 bp, Homo sapiens
tgctctgcagtcctggccc

SEQ ID NO: 9588 - DNA, 19 bp, Homo sapiens
gctctgcagtcctggcccc

SEQ ID NO: 9589 - DNA, 19 bp, Homo sapiens
ctctgcagtcctggccccc

SEQ ID NO: 9590 - DNA, 19 bp, Homo sapiens
tctgcagtcctggccccct

SEQ ID NO: 9591 - DNA, 19 bp, Homo sapiens
ctgcagtcctggccccctc

SEQ ID NO: 9592 - DNA, 19 bp, Homo sapiens
tgcagtcctggccccctcg

SEQ ID NO: 9593 - DNA, 19 bp, Homo sapiens
gcagtcctggccccctcgt

SEQ ID NO: 9594 - DNA, 19 bp, Homo sapiens
cagtcctggccccctcgtc

SEQ ID NO: 9595 - DNA, 19 bp, Homo sapiens
agtcctggccccctcgtca

SEQ ID NO: 9596 - DNA, 19 bp, Homo sapiens
gtcctggccccctcgtcat

SEQ ID NO: 9597 - DNA, 19 bp, Homo sapiens
tcctggccccctcgtcatt

SEQ ID NO: 9598 - DNA, 19 bp, Homo sapiens
cctggccccctcgtcattt

SEQ ID NO: 9599 - DNA, 19 bp, Homo sapiens
ctggccccctcgtcatttt

SEQ ID NO: 9600 - DNA, 19 bp, Homo sapiens
tggccccctcgtcattttc

SEQ ID NO: 9601 - DNA, 19 bp, Homo sapiens
ggccccctcgtcattttct

SEQ ID NO: 9602 - DNA, 19 bp, Homo sapiens
gccccctcgtcattttctt

SEQ ID NO: 9603 - DNA, 19 bp, Homo sapiens
ccccctcgtcattttcttt

SEQ ID NO: 9604 - DNA, 19 bp, Homo sapiens
cccctcgtcattttctttc

SEQ ID NO: 9605 - DNA, 19 bp, Homo sapiens
ccctcgtcattttctttcc

SEQ ID NO: 9606 - DNA, 19 bp, Homo sapiens
cctcgtcattttctttccc

SEQ ID NO: 9607 - DNA, 19 bp, Homo sapiens
ctcgtcattttctttccca

SEQ ID NO: 9608 - DNA, 19 bp, Homo sapiens
tcgtcattttctttcccag

SEQ ID NO: 9609 - DNA, 19 bp, Homo sapiens
cgtcattttctttcccaga

SEQ ID NO: 9610 - DNA, 19 bp, Homo sapiens
gtcattttctttcccagaa

SEQ ID NO: 9611 - DNA, 19 bp, Homo sapiens
tcattttctttcccagaag

SEQ ID NO: 9612 - DNA, 19 bp, Homo sapiens
cattttctttcccagaagc

SEQ ID NO: 9613 - DNA, 19 bp, Homo sapiens
attttctttcccagaagcg

SEQ ID NO: 9614 - DNA, 19 bp, Homo sapiens
ttttctttcccagaagcgc

SEQ ID NO: 9615 - DNA, 19 bp, Homo sapiens
tttctttcccagaagcgcc

SEQ ID NO: 9616 - DNA, 19 bp, Homo sapiens
ttctttcccagaagcgccc

SEQ ID NO: 9617 - DNA, 19 bp, Homo sapiens
tctttcccagaagcgccct

SEQ ID NO: 9618 - DNA, 19 bp, Homo sapiens
ctttcccagaagcgccctg

SEQ ID NO: 9619 - DNA, 19 bp, Homo sapiens
tttcccagaagcgccctgt

SEQ ID NO: 9620 - DNA, 19 bp, Homo sapiens
ttcccagaagcgccctgta

SEQ ID NO: 9621 - DNA, 19 bp, Homo sapiens
tcccagaagcgccctgtat

SEQ ID NO: 9622 - DNA, 19 bp, Homo sapiens
cccagaagcgccctgtatt

SEQ ID NO: 9623 - DNA, 19 bp, Homo sapiens
ccagaagcgccctgtattt

SEQ ID NO: 9624 - DNA, 19 bp, Homo sapiens
cagaagcgccctgtattta

SEQ ID NO: 9625 - DNA, 19 bp, Homo sapiens
agaagcgccctgtatttat

SEQ ID NO: 9626 - DNA, 19 bp, Homo sapiens
gaagcgccctgtatttatt

SEQ ID NO: 9627 - DNA, 19 bp, Homo sapiens
aagcgccctgtatttattc

SEQ ID NO: 9628 - DNA, 19 bp, Homo sapiens
agcgccctgtatttattcc

SEQ ID NO: 9629 - DNA, 19 bp, Homo sapiens
gcgccctgtatttattccc

SEQ ID NO: 9630 - DNA, 19 bp, Homo sapiens
cgccctgtatttattcccc

SEQ ID NO: 9631 - DNA, 19 bp, Homo sapiens
gccctgtatttattccccc

SEQ ID NO: 9632 - DNA, 19 bp, Homo sapiens
ccctgtatttattccccca

SEQ ID NO: 9633 - DNA, 19 bp, Homo sapiens
cctgtatttattcccccat

SEQ ID NO: 9634 - DNA, 19 bp, Homo sapiens
ctgtatttattcccccatc

SEQ ID NO: 9635 - DNA, 19 bp, Homo sapiens
tgtatttattcccccatct

SEQ ID NO: 9636 - DNA, 19 bp, Homo sapiens
gtatttattcccccatctt

SEQ ID NO: 9637 - DNA, 19 bp, Homo sapiens
tatttattcccccatcttc

SEQ ID NO: 9638 - DNA, 19 bp, Homo sapiens
atttattcccccatcttca

SEQ ID NO: 9639 - DNA, 19 bp, Homo sapiens
tttattcccccatcttcat

SEQ ID NO: 9640 - DNA, 19 bp, Homo sapiens
ttattcccccatcttcatc

SEQ ID NO: 9641 - DNA, 19 bp, Homo sapiens
tattcccccatcttcatcc

SEQ ID NO: 9642 - DNA, 19 bp, Homo sapiens
attcccccatcttcatccc

SEQ ID NO: 9643 - DNA, 19 bp, Homo sapiens
ttcccccatcttcatccca

SEQ ID NO: 9644 - DNA, 19 bp, Homo sapiens
tcccccatcttcatcccaa

SEQ ID NO: 9645 - DNA, 19 bp, Homo sapiens
cccccatcttcatcccaac

SEQ ID NO: 9646 - DNA, 19 bp, Homo sapiens
ccccatcttcatcccaaca

SEQ ID NO: 9647 - DNA, 19 bp, Homo sapiens
cccatcttcatcccaacag

SEQ ID NO: 9648 - DNA, 19 bp, Homo sapiens
ccatcttcatcccaacagc

SEQ ID NO: 9649 - DNA, 19 bp, Homo sapiens
catcttcatcccaacagcc

SEQ ID NO: 9650 - DNA, 19 bp, Homo sapiens
atcttcatcccaacagccc

SEQ ID NO: 9651 - DNA, 19 bp, Homo sapiens
tcttcatcccaacagccca

SEQ ID NO: 9652 - DNA, 19 bp, Homo sapiens
cttcatcccaacagcccag

SEQ ID NO: 9653 - DNA, 19 bp, Homo sapiens
ttcatcccaacagcccagc

SEQ ID NO: 9654 - DNA, 19 bp, Homo sapiens
tcatcccaacagcccagca

SEQ ID NO: 9655 - DNA, 19 bp, Homo sapiens
catcccaacagcccagcaa

SEQ ID NO: 9656 - DNA, 19 bp, Homo sapiens
atcccaacagcccagcaag

SEQ ID NO: 9657 - DNA, 19 bp, Homo sapiens
tcccaacagcccagcaaga

SEQ ID NO: 9658 - DNA, 19 bp, Homo sapiens
cccaacagcccagcaagaa

SEQ ID NO: 9659 - DNA, 19 bp, Homo sapiens
ccaacagcccagcaagaag

SEQ ID NO: 9660 - DNA, 19 bp, Homo sapiens
caacagcccagcaagaagg

SEQ ID NO: 9661 - DNA, 19 bp, Homo sapiens
aacagcccagcaagaagga

SEQ ID NO: 9662 - DNA, 19 bp, Homo sapiens
acagcccagcaagaaggag

SEQ ID NO: 9663 - DNA, 19 bp, Homo sapiens
cagcccagcaagaaggagg

SEQ ID NO: 9664 - DNA, 19 bp, Homo sapiens
agcccagcaagaaggagga

SEQ ID NO: 9665 - DNA, 19 bp, Homo sapiens
gcccagcaagaaggaggag

SEQ ID NO: 9666 - DNA, 19 bp, Homo sapiens
cccagcaagaaggaggaga

SEQ ID NO: 9667 - DNA, 19 bp, Homo sapiens
ccagcaagaaggaggagac

SEQ ID NO: 9668 - DNA, 19 bp, Homo sapiens
cagcaagaaggaggagaca

SEQ ID NO: 9669 - DNA, 19 bp, Homo sapiens
agcaagaaggaggagacag

SEQ ID NO: 9670 - DNA, 19 bp, Homo sapiens
gcaagaaggaggagacaga

SEQ ID NO: 9671 - DNA, 19 bp, Homo sapiens
caagaaggaggagacagag

SEQ ID NO: 9672 - DNA, 19 bp, Homo sapiens
aagaaggaggagacagaga

SEQ ID NO: 9673 - DNA, 19 bp, Homo sapiens
agaaggaggagacagagag

SEQ ID NO: 9674 - DNA, 19 bp, Homo sapiens
gaaggaggagacagagagc

SEQ ID NO: 9675 - DNA, 19 bp, Homo sapiens
aaggaggagacagagagct

SEQ ID NO: 9676 - DNA, 19 bp, Homo sapiens
aggaggagacagagagctc

SEQ ID NO: 9677 - DNA, 19 bp, Homo sapiens
ggaggagacagagagctcc

SEQ ID NO: 9678 - DNA, 19 bp, Homo sapiens
gaggagacagagagctcct

SEQ ID NO: 9679 - DNA, 19 bp, Homo sapiens
aggagacagagagctcctc

SEQ ID NO: 9680 - DNA, 19 bp, Homo sapiens
ggagacagagagctcctcc

SEQ ID NO: 9681 - DNA, 19 bp, Homo sapiens
gagacagagagctcctccc

SEQ ID NO: 9682 - DNA, 19 bp, Homo sapiens
agacagagagctcctccct

SEQ ID NO: 9683 - DNA, 19 bp, Homo sapiens
gacagagagctcctccctg

SEQ ID NO: 9684 - DNA, 19 bp, Homo sapiens
acagagagctcctccctgg

SEQ ID NO: 9685 - DNA, 19 bp, Homo sapiens
cagagagctcctccctggg

SEQ ID NO: 9686 - DNA, 19 bp, Homo sapiens
agagagctcctccctgggt

SEQ ID NO: 9687 - DNA, 19 bp, Homo sapiens
gagagctcctccctgggtt

SEQ ID NO: 9688 - DNA, 19 bp, Homo sapiens
agagctcctccctgggttg

SEQ ID NO: 9689 - DNA, 19 bp, Homo sapiens
gagctcctccctgggttgt

SEQ ID NO: 9690 - DNA, 19 bp, Homo sapiens
agctcctccctgggttgtc

SEQ ID NO: 9691 - DNA, 19 bp, Homo sapiens
gctcctccctgggttgtct

SEQ ID NO: 9692 - DNA, 19 bp, Homo sapiens
ctcctccctgggttgtctg

SEQ ID NO: 9693 - DNA, 19 bp, Homo sapiens
tcctccctgggttgtctgt

SEQ ID NO: 9694 - DNA, 19 bp, Homo sapiens
cctccctgggttgtctgtg

SEQ ID NO: 9695 - DNA, 19 bp, Homo sapiens
ctccctgggttgtctgtgg

SEQ ID NO: 9696 - DNA, 19 bp, Homo sapiens
tccctgggttgtctgtgga

SEQ ID NO: 9697 - DNA, 19 bp, Homo sapiens
ccctgggttgtctgtggac

SEQ ID NO: 9698 - DNA, 19 bp, Homo sapiens
cctgggttgtctgtggacc

SEQ ID NO: 9699 - DNA, 19 bp, Homo sapiens
ctgggttgtctgtggaccc

SEQ ID NO: 9700 - DNA, 19 bp, Homo sapiens
tgggttgtctgtggacccc

SEQ ID NO: 9701 - DNA, 19 bp, Homo sapiens
gggttgtctgtggaccccc

SEQ ID NO: 9702 - DNA, 19 bp, Homo sapiens
ggttgtctgtggacccccc

SEQ ID NO: 9703 - DNA, 19 bp, Homo sapiens
gttgtctgtggaccccccc

SEQ ID NO: 9704 - DNA, 19 bp, Homo sapiens
ttgtctgtggaccccccca

SEQ ID NO: 9705 - DNA, 19 bp, Homo sapiens
tgtctgtggacccccccag

SEQ ID NO: 9706 - DNA, 19 bp, Homo sapiens
gtctgtggacccccccagg

SEQ ID NO: 9707 - DNA, 19 bp, Homo sapiens
tctgtggacccccccagga

SEQ ID NO: 9708 - DNA, 19 bp, Homo sapiens
ctgtggacccccccaggag

SEQ ID NO: 9709 - DNA, 19 bp, Homo sapiens
tgtggacccccccaggagc

SEQ ID NO: 9710 - DNA, 19 bp, Homo sapiens
gtggacccccccaggagct

SEQ ID NO: 9711 - DNA, 19 bp, Homo sapiens
tggacccccccaggagctg

SEQ ID NO: 9712 - DNA, 19 bp, Homo sapiens
ggacccccccaggagctgc

SEQ ID NO: 9713 - DNA, 19 bp, Homo sapiens
gacccccccaggagctgct

SEQ ID NO: 9714 - DNA, 19 bp, Homo sapiens
acccccccaggagctgcta

SEQ ID NO: 9715 - DNA, 19 bp, Homo sapiens
cccccccaggagctgctaa

SEQ ID NO: 9716 - DNA, 19 bp, Homo sapiens
ccccccaggagctgctaat

SEQ ID NO: 9717 - DNA, 19 bp, Homo sapiens
cccccaggagctgctaatt

SEQ ID NO: 9718 - DNA, 19 bp, Homo sapiens
ccccaggagctgctaattg

SEQ ID NO: 9719 - DNA, 19 bp, Homo sapiens
cccaggagctgctaattgg

SEQ ID NO: 9720 - DNA, 19 bp, Homo sapiens
ccaggagctgctaattggc

SEQ ID NO: 9721 - DNA, 19 bp, Homo sapiens
caggagctgctaattggca

SEQ ID NO: 9722 - DNA, 19 bp, Homo sapiens
aggagctgctaattggcag

SEQ ID NO: 9723 - DNA, 19 bp, Homo sapiens
ggagctgctaattggcagc

SEQ ID NO: 9724 - DNA, 19 bp, Homo sapiens
gagctgctaattggcagca

SEQ ID NO: 9725 - DNA, 19 bp, Homo sapiens
agctgctaattggcagcac

SEQ ID NO: 9726 - DNA, 19 bp, Homo sapiens
gctgctaattggcagcacc

SEQ ID NO: 9727 - DNA, 19 bp, Homo sapiens
ctgctaattggcagcaccc

SEQ ID NO: 9728 - DNA, 19 bp, Homo sapiens
tgctaattggcagcaccca

SEQ ID NO: 9729 - DNA, 19 bp, Homo sapiens
gctaattggcagcacccac

SEQ ID NO: 9730 - DNA, 19 bp, Homo sapiens
ctaattggcagcacccact

SEQ ID NO: 9731 - DNA, 19 bp, Homo sapiens
taattggcagcacccactc

SEQ ID NO: 9732 - DNA, 19 bp, Homo sapiens
aattggcagcacccactca

SEQ ID NO: 9733 - DNA, 19 bp, Homo sapiens
attggcagcacccactcag

SEQ ID NO: 9734 - DNA, 19 bp, Homo sapiens
ttggcagcacccactcagc

SEQ ID NO: 9735 - DNA, 19 bp, Homo sapiens
tggcagcacccactcagcc

SEQ ID NO: 9736 - DNA, 19 bp, Homo sapiens
ggcagcacccactcagcca

SEQ ID NO: 9737 - DNA, 19 bp, Homo sapiens
gcagcacccactcagccat

SEQ ID NO: 9738 - DNA, 19 bp, Homo sapiens
cagcacccactcagccatt

SEQ ID NO: 9739 - DNA, 19 bp, Homo sapiens
agcacccactcagccattc

SEQ ID NO: 9740 - DNA, 19 bp, Homo sapiens
gcacccactcagccattct

SEQ ID NO: 9741 - DNA, 19 bp, Homo sapiens
cacccactcagccattctc

SEQ ID NO: 9742 - DNA, 19 bp, Homo sapiens
acccactcagccattctct

SEQ ID NO: 9743 - DNA, 19 bp, Homo sapiens
cccactcagccattctcta

SEQ ID NO: 9744 - DNA, 19 bp, Homo sapiens
ccactcagccattctctac

SEQ ID NO: 9745 - DNA, 19 bp, Homo sapiens
cactcagccattctctacc

SEQ ID NO: 9746 - DNA, 19 bp, Homo sapiens
actcagccattctctaccc

SEQ ID NO: 9747 - DNA, 19 bp, Homo sapiens
ctcagccattctctaccca

SEQ ID NO: 9748 - DNA, 19 bp, Homo sapiens
tcagccattctctacccat

SEQ ID NO: 9749 - DNA, 19 bp, Homo sapiens
cagccattctctacccatc

SEQ ID NO: 9750 - DNA, 19 bp, Homo sapiens
agccattctctacccatcc

SEQ ID NO: 9751 - DNA, 19 bp, Homo sapiens
gccattctctacccatcct

SEQ ID NO: 9752 - DNA, 19 bp, Homo sapiens
ccattctctacccatcctt

SEQ ID NO: 9753 - DNA, 19 bp, Homo sapiens
cattctctacccatcctta

SEQ ID NO: 9754 - DNA, 19 bp, Homo sapiens
attctctacccatccttag

SEQ ID NO: 9755 - DNA, 19 bp, Homo sapiens
ttctctacccatccttagt

SEQ ID NO: 9756 - DNA, 19 bp, Homo sapiens
tctctacccatccttagta

SEQ ID NO: 9757 - DNA, 19 bp, Homo sapiens
ctctacccatccttagtac

SEQ ID NO: 9758 - DNA, 19 bp, Homo sapiens
tctacccatccttagtaca

SEQ ID NO: 9759 - DNA, 19 bp, Homo sapiens
ctacccatccttagtacat

SEQ ID NO: 9760 - DNA, 19 bp, Homo sapiens
tacccatccttagtacatg

SEQ ID NO: 9761 - DNA, 19 bp, Homo sapiens
acccatccttagtacatgc

SEQ ID NO: 9762 - DNA, 19 bp, Homo sapiens
cccatccttagtacatgct

SEQ ID NO: 9763 - DNA, 19 bp, Homo sapiens
ccatccttagtacatgctc

SEQ ID NO: 9764 - DNA, 19 bp, Homo sapiens
catccttagtacatgctct

SEQ ID NO: 9765 - DNA, 19 bp, Homo sapiens
atccttagtacatgctctg

SEQ ID NO: 9766 - DNA, 19 bp, Homo sapiens
tccttagtacatgctctgt

SEQ ID NO: 9767 - DNA, 19 bp, Homo sapiens
ccttagtacatgctctgtc

SEQ ID NO: 9768 - DNA, 19 bp, Homo sapiens
cttagtacatgctctgtcc

SEQ ID NO: 9769 - DNA, 19 bp, Homo sapiens
ttagtacatgctctgtcca

SEQ ID NO: 9770 - DNA, 19 bp, Homo sapiens
tagtacatgctctgtccag

SEQ ID NO: 9771 - DNA, 19 bp, Homo sapiens
agtacatgctctgtccagc

SEQ ID NO: 9772 - DNA, 19 bp, Homo sapiens
gtacatgctctgtccagct

SEQ ID NO: 9773 - DNA, 19 bp, Homo sapiens
tacatgctctgtccagctt

SEQ ID NO: 9774 - DNA, 19 bp, Homo sapiens
acatgctctgtccagcttt

SEQ ID NO: 9775 - DNA, 19 bp, Homo sapiens
catgctctgtccagctttc

SEQ ID NO: 9776 - DNA, 19 bp, Homo sapiens
atgctctgtccagctttcc

SEQ ID NO: 9777 - DNA, 19 bp, Homo sapiens
tgctctgtccagctttccc

SEQ ID NO: 9778 - DNA, 19 bp, Homo sapiens
gctctgtccagctttcccc

SEQ ID NO: 9779 - DNA, 19 bp, Homo sapiens
ctctgtccagctttcccca

SEQ ID NO: 9780 - DNA, 19 bp, Homo sapiens
tctgtccagctttccccag

SEQ ID NO: 9781 - DNA, 19 bp, Homo sapiens
ctgtccagctttccccagg

SEQ ID NO: 9782 - DNA, 19 bp, Homo sapiens
tgtccagctttccccaggg

SEQ ID NO: 9783 - DNA, 19 bp, Homo sapiens
gtccagctttccccagggt

SEQ ID NO: 9784 - DNA, 19 bp, Homo sapiens
tccagctttccccagggtg

SEQ ID NO: 9785 - DNA, 19 bp, Homo sapiens
ccagctttccccagggtga

SEQ ID NO: 9786 - DNA, 19 bp, Homo sapiens
cagctttccccagggtgac

SEQ ID NO: 9787 - DNA, 19 bp, Homo sapiens
agctttccccagggtgaca

SEQ ID NO: 9788 - DNA, 19 bp, Homo sapiens
gctttccccagggtgacat

SEQ ID NO: 9789 - DNA, 19 bp, Homo sapiens
ctttccccagggtgacata

SEQ ID NO: 9790 - DNA, 19 bp, Homo sapiens
tttccccagggtgacatac

SEQ ID NO: 9791 - DNA, 19 bp, Homo sapiens
ttccccagggtgacataca

SEQ ID NO: 9792 - DNA, 19 bp, Homo sapiens
tccccagggtgacatacag

SEQ ID NO: 9793 - DNA, 19 bp, Homo sapiens
ccccagggtgacatacaga

SEQ ID NO: 9794 - DNA, 19 bp, Homo sapiens
cccagggtgacatacagaa

SEQ ID NO: 9795 - DNA, 19 bp, Homo sapiens
ccagggtgacatacagaag

SEQ ID NO: 9796 - DNA, 19 bp, Homo sapiens
cagggtgacatacagaagg

SEQ ID NO: 9797 - DNA, 19 bp, Homo sapiens
agggtgacatacagaaggg

SEQ ID NO: 9798 - DNA, 19 bp, Homo sapiens
gggtgacatacagaagggg

SEQ ID NO: 9799 - DNA, 19 bp, Homo sapiens
ggtgacatacagaaggggc

SEQ ID NO: 9800 - DNA, 19 bp, Homo sapiens
gtgacatacagaaggggca

SEQ ID NO: 9801 - DNA, 19 bp, Homo sapiens
tgacatacagaaggggcaa

SEQ ID NO: 9802 - DNA, 19 bp, Homo sapiens
tggcctcaaagaaagccgt

SEQ ID NO: 9803 - DNA, 19 bp, Homo sapiens
ctggcctcaaagaaagccg

SEQ ID NO: 9804 - DNA, 19 bp, Homo sapiens
cctggcctcaaagaaagcc

SEQ ID NO: 9805 - DNA, 19 bp, Homo sapiens
tcctggcctcaaagaaagc

SEQ ID NO: 9806 - DNA, 19 bp, Homo sapiens
gtcctggcctcaaagaaag

SEQ ID NO: 9807 - DNA, 19 bp, Homo sapiens
agtcctggcctcaaagaaa

SEQ ID NO: 9808 - DNA, 19 bp, Homo sapiens
cagtcctggcctcaaagaa

SEQ ID NO: 9809 - DNA, 19 bp, Homo sapiens
ccagtcctggcctcaaaga

SEQ ID NO: 9810 - DNA, 19 bp, Homo sapiens
cccagtcctggcctcaaag

SEQ ID NO: 9811 - DNA, 19 bp, Homo sapiens
acccagtcctggcctcaaa

SEQ ID NO: 9812 - DNA, 19 bp, Homo sapiens
cacccagtcctggcctcaa

SEQ ID NO: 9813 - DNA, 19 bp, Homo sapiens
tcacccagtcctggcctca

SEQ ID NO: 9814 - DNA, 19 bp, Homo sapiens
atcacccagtcctggcctc

SEQ ID NO: 9815 - DNA, 19 bp, Homo sapiens
catcacccagtcctggcct

SEQ ID NO: 9816 - DNA, 19 bp, Homo sapiens
ccatcacccagtcctggcc

SEQ ID NO: 9817 - DNA, 19 bp, Homo sapiens
accatcacccagtcctggc

SEQ ID NO: 9818 - DNA, 19 bp, Homo sapiens
caccatcacccagtcctgg

SEQ ID NO: 9819 - DNA, 19 bp, Homo sapiens
acaccatcacccagtcctg

SEQ ID NO: 9820 - DNA, 19 bp, Homo sapiens
gacaccatcacccagtcct

SEQ ID NO: 9821 - DNA, 19 bp, Homo sapiens
cgacaccatcacccagtcc

SEQ ID NO: 9822 - DNA, 19 bp, Homo sapiens
gcgacaccatcacccagtc

SEQ ID NO: 9823 - DNA, 19 bp, Homo sapiens
agcgacaccatcacccagt

SEQ ID NO: 9824 - DNA, 19 bp, Homo sapiens
tagcgacaccatcacccag

SEQ ID NO: 9825 - DNA, 19 bp, Homo sapiens
gtagcgacaccatcaccca

SEQ ID NO: 9826 - DNA, 19 bp, Homo sapiens
ggtagcgacaccatcaccc

SEQ ID NO: 9827 - DNA, 19 bp, Homo sapiens
gggtagcgacaccatcacc

SEQ ID NO: 9828 - DNA, 19 bp, Homo sapiens
ggggtagcgacaccatcac

SEQ ID NO: 9829 - DNA, 19 bp, Homo sapiens
gggggtagcgacaccatca

SEQ ID NO: 9830 - DNA, 19 bp, Homo sapiens
cgggggtagcgacaccatc

SEQ ID NO: 9831 - DNA, 19 bp, Homo sapiens
gcgggggtagcgacaccat

SEQ ID NO: 9832 - DNA, 19 bp, Homo sapiens
ggcgggggtagcgacacca

SEQ ID NO: 9833 - DNA, 19 bp, Homo sapiens
cggcgggggtagcgacacc

SEQ ID NO: 9834 - DNA, 19 bp, Homo sapiens
gcggcgggggtagcgacac

SEQ ID NO: 9835 - DNA, 19 bp, Homo sapiens
tgcggcgggggtagcgaca

SEQ ID NO: 9836 - DNA, 19 bp, Homo sapiens
ctgcggcgggggtagcgac

SEQ ID NO: 9837 - DNA, 19 bp, Homo sapiens
actgcggcgggggtagcga

SEQ ID NO: 9838 - DNA, 19 bp, Homo sapiens
gactgcggcgggggtagcg

SEQ ID NO: 9839 - DNA, 19 bp, Homo sapiens
agactgcggcgggggtagc

SEQ ID NO: 9840 - DNA, 19 bp, Homo sapiens
cagactgcggcgggggtag

SEQ ID NO: 9841 - DNA, 19 bp, Homo sapiens
tcagactgcggcgggggta

SEQ ID NO: 9842 - DNA, 19 bp, Homo sapiens
gtcagactgcggcgggggt

SEQ ID NO: 9843 - DNA, 19 bp, Homo sapiens
cgtcagactgcggcggggg

SEQ ID NO: 9844 - DNA, 19 bp, Homo sapiens
acgtcagactgcggcgggg

SEQ ID NO: 9845 - DNA, 19 bp, Homo sapiens
gacgtcagactgcggcggg

SEQ ID NO: 9846 - DNA, 19 bp, Homo sapiens
tgacgtcagactgcggcgg

SEQ ID NO: 9847 - DNA, 19 bp, Homo sapiens
gtgacgtcagactgcggcg

SEQ ID NO: 9848 - DNA, 19 bp, Homo sapiens
cgtgacgtcagactgcggc

SEQ ID NO: 9849 - DNA, 19 bp, Homo sapiens
gcgtgacgtcagactgcgg

SEQ ID NO: 9850 - DNA, 19 bp, Homo sapiens
agcgtgacgtcagactgcg

SEQ ID NO: 9851 - DNA, 19 bp, Homo sapiens
cagcgtgacgtcagactgc

SEQ ID NO: 9852 - DNA, 19 bp, Homo sapiens
gcagcgtgacgtcagactg

SEQ ID NO: 9853 - DNA, 19 bp, Homo sapiens
ggcagcgtgacgtcagact

SEQ ID NO: 9854 - DNA, 19 bp, Homo sapiens
cggcagcgtgacgtcagac

SEQ ID NO: 9855 - DNA, 19 bp, Homo sapiens
ccggcagcgtgacgtcaga

SEQ ID NO: 9856 - DNA, 19 bp, Homo sapiens
cccggcagcgtgacgtcag

SEQ ID NO: 9857 - DNA, 19 bp, Homo sapiens
gcccggcagcgtgacgtca

SEQ ID NO: 9858 - DNA, 19 bp, Homo sapiens
ggcccggcagcgtgacgtc

SEQ ID NO: 9859 - DNA, 19 bp, Homo sapiens
gggcccggcagcgtgacgt

SEQ ID NO: 9860 - DNA, 19 bp, Homo sapiens
ggggcccggcagcgtgacg

SEQ ID NO: 9861 - DNA, 19 bp, Homo sapiens
tggggcccggcagcgtgac

SEQ ID NO: 9862 - DNA, 19 bp, Homo sapiens
gtggggcccggcagcgtga

SEQ ID NO: 9863 - DNA, 19 bp, Homo sapiens
ggtggggcccggcagcgtg

SEQ ID NO: 9864 - DNA, 19 bp, Homo sapiens
tggtggggcccggcagcgt

SEQ ID NO: 9865 - DNA, 19 bp, Homo sapiens
ctggtggggcccggcagcg

SEQ ID NO: 9866 - DNA, 19 bp, Homo sapiens
tctggtggggcccggcagc

SEQ ID NO: 9867 - DNA, 19 bp, Homo sapiens
gtctggtggggcccggcag

SEQ ID NO: 9868 - DNA, 19 bp, Homo sapiens
agtctggtggggcccggca

SEQ ID NO: 9869 - DNA, 19 bp, Homo sapiens
cagtctggtggggcccggc

SEQ ID NO: 9870 - DNA, 19 bp, Homo sapiens
ccagtctggtggggcccgg

SEQ ID NO: 9871 - DNA, 19 bp, Homo sapiens
tccagtctggtggggcccg

SEQ ID NO: 9872 - DNA, 19 bp, Homo sapiens
ctccagtctggtggggccc

SEQ ID NO: 9873 - DNA, 19 bp, Homo sapiens
cctccagtctggtggggcc

SEQ ID NO: 9874 - DNA, 19 bp, Homo sapiens
ccctccagtctggtggggc

SEQ ID NO: 9875 - DNA, 19 bp, Homo sapiens
gccctccagtctggtgggg

SEQ ID NO: 9876 - DNA, 19 bp, Homo sapiens
cgccctccagtctggtggg

SEQ ID NO: 9877 - DNA, 19 bp, Homo sapiens
tcgccctccagtctggtgg

SEQ ID NO: 9878 - DNA, 19 bp, Homo sapiens
ctcgccctccagtctggtg

SEQ ID NO: 9879 - DNA, 19 bp, Homo sapiens
gctcgccctccagtctggt

SEQ ID NO: 9880 - DNA, 19 bp, Homo sapiens
cgctcgccctccagtctgg

SEQ ID NO: 9881 - DNA, 19 bp, Homo sapiens
gcgctcgccctccagtctg

SEQ ID NO: 9882 - DNA, 19 bp, Homo sapiens
ggcgctcgccctccagtct

SEQ ID NO: 9883 - DNA, 19 bp, Homo sapiens
tggcgctcgccctccagtc

SEQ ID NO: 9884 - DNA, 19 bp, Homo sapiens
ttggcgctcgccctccagt

SEQ ID NO: 9885 - DNA, 19 bp, Homo sapiens
cttggcgctcgccctccag

SEQ ID NO: 9886 - DNA, 19 bp, Homo sapiens
ccttggcgctcgccctcca

SEQ ID NO: 9887 - DNA, 19 bp, Homo sapiens
cccttggcgctcgccctcc

SEQ ID NO: 9888 - DNA, 19 bp, Homo sapiens
ccccttggcgctcgccctc

SEQ ID NO: 9889 - DNA, 19 bp, Homo sapiens
tccccttggcgctcgccct

SEQ ID NO: 9890 - DNA, 19 bp, Homo sapiens
gtccccttggcgctcgccc

SEQ ID NO: 9891 - DNA, 19 bp, Homo sapiens
ggtccccttggcgctcgcc

SEQ ID NO: 9892 - DNA, 19 bp, Homo sapiens
aggtccccttggcgctcgc

SEQ ID NO: 9893 - DNA, 19 bp, Homo sapiens
gaggtccccttggcgctcg

SEQ ID NO: 9894 - DNA, 19 bp, Homo sapiens
tgaggtccccttggcgctc

SEQ ID NO: 9895 - DNA, 19 bp, Homo sapiens
atgaggtccccttggcgct

SEQ ID NO: 9896 - DNA, 19 bp, Homo sapiens
catgaggtccccttggcgc

SEQ ID NO: 9897 - DNA, 19 bp, Homo sapiens
gcatgaggtccccttggcg

SEQ ID NO: 9898 - DNA, 19 bp, Homo sapiens
tgcatgaggtccccttggc

SEQ ID NO: 9899 - DNA, 19 bp, Homo sapiens
ctgcatgaggtccccttgg

SEQ ID NO: 9900 - DNA, 19 bp, Homo sapiens
cctgcatgaggtccccttg

SEQ ID NO: 9901 - DNA, 19 bp, Homo sapiens
gcctgcatgaggtcccctt

SEQ ID NO: 9902 - DNA, 19 bp, Homo sapiens
tgcctgcatgaggtcccct

SEQ ID NO: 9903 - DNA, 19 bp, Homo sapiens
gtgcctgcatgaggtcccc

SEQ ID NO: 9904 - DNA, 19 bp, Homo sapiens
ggtgcctgcatgaggtccc

SEQ ID NO: 9905 - DNA, 19 bp, Homo sapiens
cggtgcctgcatgaggtcc

SEQ ID NO: 9906 - DNA, 19 bp, Homo sapiens
ccggtgcctgcatgaggtc

SEQ ID NO: 9907 - DNA, 19 bp, Homo sapiens
cccggtgcctgcatgaggt

SEQ ID NO: 9908 - DNA, 19 bp, Homo sapiens
gcccggtgcctgcatgagg

SEQ ID NO: 9909 - DNA, 19 bp, Homo sapiens
ggcccggtgcctgcatgag

SEQ ID NO: 9910 - DNA, 19 bp, Homo sapiens
aggcccggtgcctgcatga

SEQ ID NO: 9911 - DNA, 19 bp, Homo sapiens
gaggcccggtgcctgcatg

SEQ ID NO: 9912 - DNA, 19 bp, Homo sapiens
ggaggcccggtgcctgcat

SEQ ID NO: 9913 - DNA, 19 bp, Homo sapiens
gggaggcccggtgcctgca

SEQ ID NO: 9914 - DNA, 19 bp, Homo sapiens
tgggaggcccggtgcctgc

SEQ ID NO: 9915 - DNA, 19 bp, Homo sapiens
ctgggaggcccggtgcctg

SEQ ID NO: 9916 - DNA, 19 bp, Homo sapiens
cctgggaggcccggtgcct

SEQ ID NO: 9917 - DNA, 19 bp, Homo sapiens
gcctgggaggcccggtgcc

SEQ ID NO: 9918 - DNA, 19 bp, Homo sapiens
agcctgggaggcccggtgc

SEQ ID NO: 9919 - DNA, 19 bp, Homo sapiens
gagcctgggaggcccggtg

SEQ ID NO: 9920 - DNA, 19 bp, Homo sapiens
ggagcctgggaggcccggt

SEQ ID NO: 9921 - DNA, 19 bp, Homo sapiens
gggagcctgggaggcccgg

SEQ ID NO: 9922 - DNA, 19 bp, Homo sapiens
ggggagcctgggaggcccg

SEQ ID NO: 9923 - DNA, 19 bp, Homo sapiens
aggggagcctgggaggccc

SEQ ID NO: 9924 - DNA, 19 bp, Homo sapiens
caggggagcctgggaggcc

SEQ ID NO: 9925 - DNA, 19 bp, Homo sapiens
gcaggggagcctgggaggc

SEQ ID NO: 9926 - DNA, 19 bp, Homo sapiens
ggcaggggagcctgggagg

SEQ ID NO: 9927 - DNA, 19 bp, Homo sapiens
gggcaggggagcctgggag

SEQ ID NO: 9928 - DNA, 19 bp, Homo sapiens
ggggcaggggagcctggga

SEQ ID NO: 9929 - DNA, 19 bp, Homo sapiens
tggggcaggggagcctggg

SEQ ID NO: 9930 - DNA, 19 bp, Homo sapiens
gtggggcaggggagcctgg

SEQ ID NO: 9931 - DNA, 19 bp, Homo sapiens
tgtggggcaggggagcctg

SEQ ID NO: 9932 - DNA, 19 bp, Homo sapiens
ctgtggggcaggggagcct

SEQ ID NO: 9933 - DNA, 19 bp, Homo sapiens
tctgtggggcaggggagcc

SEQ ID NO: 9934 - DNA, 19 bp, Homo sapiens
ctctgtggggcaggggagc

SEQ ID NO: 9935 - DNA, 19 bp, Homo sapiens
actctgtggggcaggggag

SEQ ID NO: 9936 - DNA, 19 bp, Homo sapiens
tactctgtggggcagggga

SEQ ID NO: 9937 - DNA, 19 bp, Homo sapiens
ttactctgtggggcagggg

SEQ ID NO: 9938 - DNA, 19 bp, Homo sapiens
cttactctgtggggcaggg

SEQ ID NO: 9939 - DNA, 19 bp, Homo sapiens
gcttactctgtggggcagg

SEQ ID NO: 9940 - DNA, 19 bp, Homo sapiens
tgcttactctgtggggcag

SEQ ID NO: 9941 - DNA, 19 bp, Homo sapiens
atgcttactctgtggggca

SEQ ID NO: 9942 - DNA, 19 bp, Homo sapiens
catgcttactctgtggggc

SEQ ID NO: 9943 - DNA, 19 bp, Homo sapiens
gcatgcttactctgtgggg

SEQ ID NO: 9944 - DNA, 19 bp, Homo sapiens
ggcatgcttactctgtggg

SEQ ID NO: 9945 - DNA, 19 bp, Homo sapiens
cggcatgcttactctgtgg

SEQ ID NO: 9946 - DNA, 19 bp, Homo sapiens
ccggcatgcttactctgtg

SEQ ID NO: 9947 - DNA, 19 bp, Homo sapiens
gccggcatgcttactctgt

SEQ ID NO: 9948 - DNA, 19 bp, Homo sapiens
agccggcatgcttactctg

SEQ ID NO: 9949 - DNA, 19 bp, Homo sapiens
aagccggcatgcttactct

SEQ ID NO: 9950 - DNA, 19 bp, Homo sapiens
gaagccggcatgcttactc

SEQ ID NO: 9951 - DNA, 19 bp, Homo sapiens
tgaagccggcatgcttact

SEQ ID NO: 9952 - DNA, 19 bp, Homo sapiens
ctgaagccggcatgcttac

SEQ ID NO: 9953 - DNA, 19 bp, Homo sapiens
gctgaagccggcatgctta

SEQ ID NO: 9954 - DNA, 19 bp, Homo sapiens
agctgaagccggcatgctt

SEQ ID NO: 9955 - DNA, 19 bp, Homo sapiens
cagctgaagccggcatgct

SEQ ID NO: 9956 - DNA, 19 bp, Homo sapiens
gcagctgaagccggcatgc

SEQ ID NO: 9957 - DNA, 19 bp, Homo sapiens
agcagctgaagccggcatg

SEQ ID NO: 9958 - DNA, 19 bp, Homo sapiens
gagcagctgaagccggcat

SEQ ID NO: 9959 - DNA, 19 bp, Homo sapiens
cgagcagctgaagccggca

SEQ ID NO: 9960 - DNA, 19 bp, Homo sapiens
acgagcagctgaagccggc

SEQ ID NO: 9961 - DNA, 19 bp, Homo sapiens
gacgagcagctgaagccgg

SEQ ID NO: 9962 - DNA, 19 bp, Homo sapiens
tgacgagcagctgaagccg

SEQ ID NO: 9963 - DNA, 19 bp, Homo sapiens
atgacgagcagctgaagcc

SEQ ID NO: 9964 - DNA, 19 bp, Homo sapiens
aatgacgagcagctgaagc

SEQ ID NO: 9965 - DNA, 19 bp, Homo sapiens
aaatgacgagcagctgaag

SEQ ID NO: 9966 - DNA, 19 bp, Homo sapiens
caaatgacgagcagctgaa

SEQ ID NO: 9967 - DNA, 19 bp, Homo sapiens
acaaatgacgagcagctga

SEQ ID NO: 9968 - DNA, 19 bp, Homo sapiens
cacaaatgacgagcagctg

SEQ ID NO: 9969 - DNA, 19 bp, Homo sapiens
acacaaatgacgagcagct

SEQ ID NO: 9970 - DNA, 19 bp, Homo sapiens
gacacaaatgacgagcagc

SEQ ID NO: 9971 - DNA, 19 bp, Homo sapiens
ggacacaaatgacgagcag

SEQ ID NO: 9972 - DNA, 19 bp, Homo sapiens
cggacacaaatgacgagca

SEQ ID NO: 9973 - DNA, 19 bp, Homo sapiens
tcggacacaaatgacgagc

SEQ ID NO: 9974 - DNA, 19 bp, Homo sapiens
gtcggacacaaatgacgag

SEQ ID NO: 9975 - DNA, 19 bp, Homo sapiens
cgtcggacacaaatgacga

SEQ ID NO: 9976 - DNA, 19 bp, Homo sapiens
ccgtcggacacaaatgacg

SEQ ID NO: 9977 - DNA, 19 bp, Homo sapiens
gccgtcggacacaaatgac

SEQ ID NO: 9978 - DNA, 19 bp, Homo sapiens
ggccgtcggacacaaatga

SEQ ID NO: 9979 - DNA, 19 bp, Homo sapiens
gggccgtcggacacaaatg

SEQ ID NO: 9980 - DNA, 19 bp, Homo sapiens
agggccgtcggacacaaat

SEQ ID NO: 9981 - DNA, 19 bp, Homo sapiens
gagggccgtcggacacaaa

SEQ ID NO: 9982 - DNA, 19 bp, Homo sapiens
ggagggccgtcggacacaa

SEQ ID NO: 9983 - DNA, 19 bp, Homo sapiens
tggagggccgtcggacaca

SEQ ID NO: 9984 - DNA, 19 bp, Homo sapiens
ctggagggccgtcggacac

SEQ ID NO: 9985 - DNA, 19 bp, Homo sapiens
tctggagggccgtcggaca

SEQ ID NO: 9986 - DNA, 19 bp, Homo sapiens
ctctggagggccgtcggac

SEQ ID NO: 9987 - DNA, 19 bp, Homo sapiens
tctctggagggccgtcgga

SEQ ID NO: 9988 - DNA, 19 bp, Homo sapiens
ctctctggagggccgtcgg

SEQ ID NO: 9989 - DNA, 19 bp, Homo sapiens
cctctctggagggccgtcg

SEQ ID NO: 9990 - DNA, 19 bp, Homo sapiens
tcctctctggagggccgtc

SEQ ID NO: 9991 - DNA, 19 bp, Homo sapiens
gtcctctctggagggccgt

SEQ ID NO: 9992 - DNA, 19 bp, Homo sapiens
tgtcctctctggagggccg

SEQ ID NO: 9993 - DNA, 19 bp, Homo sapiens
gtgtcctctctggagggcc

SEQ ID NO: 9994 - DNA, 19 bp, Homo sapiens
ggtgtcctctctggagggc

SEQ ID NO: 9995 - DNA, 19 bp, Homo sapiens
gggtgtcctctctggaggg

SEQ ID NO: 9996 - DNA, 19 bp, Homo sapiens
agggtgtcctctctggagg

SEQ ID NO: 9997 - DNA, 19 bp, Homo sapiens
gagggtgtcctctctggag

SEQ ID NO: 9998 - DNA, 19 bp, Homo sapiens
tgagggtgtcctctctgga

SEQ ID NO: 9999 - DNA, 19 bp, Homo sapiens
gtgagggtgtcctctctgg

SEQ ID NO: 10000 - DNA, 19 bp, Homo sapiens
agtgagggtgtcctctctg

SEQ ID NO: 10001 - DNA, 19 bp, Homo sapiens
cagtgagggtgtcctctct

SEQ ID NO: 10002 - DNA, 19 bp, Homo sapiens
gcagtgagggtgtcctctc

SEQ ID NO: 10003 - DNA, 19 bp, Homo sapiens
ggcagtgagggtgtcctct

SEQ ID NO: 10004 - DNA, 19 bp, Homo sapiens
gggcagtgagggtgtcctc

SEQ ID NO: 10005 - DNA, 19 bp, Homo sapiens
ggggcagtgagggtgtcct

SEQ ID NO: 10006 - DNA, 19 bp, Homo sapiens
gggggcagtgagggtgtcc

SEQ ID NO: 10007 - DNA, 19 bp, Homo sapiens
tgggggcagtgagggtgtc

SEQ ID NO: 10008 - DNA, 19 bp, Homo sapiens
gtgggggcagtgagggtgt

SEQ ID NO: 10009 - DNA, 19 bp, Homo sapiens
tgtgggggcagtgagggtg

SEQ ID NO: 10010 - DNA, 19 bp, Homo sapiens
gtgtgggggcagtgagggt

SEQ ID NO: 10011 - DNA, 19 bp, Homo sapiens
tgtgtgggggcagtgaggg

SEQ ID NO: 10012 - DNA, 19 bp, Homo sapiens
ctgtgtgggggcagtgagg

SEQ ID NO: 10013 - DNA, 19 bp, Homo sapiens
gctgtgtgggggcagtgag

SEQ ID NO: 10014 - DNA, 19 bp, Homo sapiens
ggctgtgtgggggcagtga

SEQ ID NO: 10015 - DNA, 19 bp, Homo sapiens
gggctgtgtgggggcagtg

SEQ ID NO: 10016 - DNA, 19 bp, Homo sapiens
ggggctgtgtgggggcagt

SEQ ID NO: 10017 - DNA, 19 bp, Homo sapiens
gggggctgtgtgggggcag

SEQ ID NO: 10018 - DNA, 19 bp, Homo sapiens
cgggggctgtgtgggggca

SEQ ID NO: 10019 - DNA, 19 bp, Homo sapiens
gcgggggctgtgtgggggc

SEQ ID NO: 10020 - DNA, 19 bp, Homo sapiens
tgcgggggctgtgtggggg

SEQ ID NO: 10021 - DNA, 19 bp, Homo sapiens
atgcgggggctgtgtgggg

SEQ ID NO: 10022 - DNA, 19 bp, Homo sapiens
aatgcgggggctgtgtggg

SEQ ID NO: 10023 - DNA, 19 bp, Homo sapiens
caatgcgggggctgtgtgg

SEQ ID NO: 10024 - DNA, 19 bp, Homo sapiens
gcaatgcgggggctgtgtg

SEQ ID NO: 10025 - DNA, 19 bp, Homo sapiens
cgcaatgcgggggctgtgt

SEQ ID NO: 10026 - DNA, 19 bp, Homo sapiens
acgcaatgcgggggctgtg

SEQ ID NO: 10027 - DNA, 19 bp, Homo sapiens
gacgcaatgcgggggctgt

SEQ ID NO: 10028 - DNA, 19 bp, Homo sapiens
tgacgcaatgcgggggctg

SEQ ID NO: 10029 - DNA, 19 bp, Homo sapiens
gtgacgcaatgcgggggct

SEQ ID NO: 10030 - DNA, 19 bp, Homo sapiens
ggtgacgcaatgcgggggc

SEQ ID NO: 10031 - DNA, 19 bp, Homo sapiens
tggtgacgcaatgcggggg

SEQ ID NO: 10032 - DNA, 19 bp, Homo sapiens
ctggtgacgcaatgcgggg

SEQ ID NO: 10033 - DNA, 19 bp, Homo sapiens
cctggtgacgcaatgcggg

SEQ ID NO: 10034 - DNA, 19 bp, Homo sapiens
ccctggtgacgcaatgcgg

SEQ ID NO: 10035 - DNA, 19 bp, Homo sapiens
gccctggtgacgcaatgcg

SEQ ID NO: 10036 - DNA, 19 bp, Homo sapiens
ggccctggtgacgcaatgc

SEQ ID NO: 10037 - DNA, 19 bp, Homo sapiens
gggccctggtgacgcaatg

SEQ ID NO: 10038 - DNA, 19 bp, Homo sapiens
cgggccctggtgacgcaat

SEQ ID NO: 10039 - DNA, 19 bp, Homo sapiens
tcgggccctggtgacgcaa

SEQ ID NO: 10040 - DNA, 19 bp, Homo sapiens
ctcgggccctggtgacgca

SEQ ID NO: 10041 - DNA, 19 bp, Homo sapiens
gctcgggccctggtgacgc

SEQ ID NO: 10042 - DNA, 19 bp, Homo sapiens
tgctcgggccctggtgacg

SEQ ID NO: 10043 - DNA, 19 bp, Homo sapiens
ttgctcgggccctggtgac

SEQ ID NO: 10044 - DNA, 19 bp, Homo sapiens
cttgctcgggccctggtga

SEQ ID NO: 10045 - DNA, 19 bp, Homo sapiens
acttgctcgggccctggtg

SEQ ID NO: 10046 - DNA, 19 bp, Homo sapiens
gacttgctcgggccctggt

SEQ ID NO: 10047 - DNA, 19 bp, Homo sapiens
ggacttgctcgggccctgg

SEQ ID NO: 10048 - DNA, 19 bp, Homo sapiens
tggacttgctcgggccctg

SEQ ID NO: 10049 - DNA, 19 bp, Homo sapiens
ctggacttgctcgggccct

SEQ ID NO: 10050 - DNA, 19 bp, Homo sapiens
cctggacttgctcgggccc

SEQ ID NO: 10051 - DNA, 19 bp, Homo sapiens
ccctggacttgctcgggcc

SEQ ID NO: 10052 - DNA, 19 bp, Homo sapiens
gccctggacttgctcgggc

SEQ ID NO: 10053 - DNA, 19 bp, Homo sapiens
ggccctggacttgctcggg

SEQ ID NO: 10054 - DNA, 19 bp, Homo sapiens
tggccctggacttgctcgg

SEQ ID NO: 10055 - DNA, 19 bp, Homo sapiens
gtggccctggacttgctcg

SEQ ID NO: 10056 - DNA, 19 bp, Homo sapiens
agtggccctggacttgctc

SEQ ID NO: 10057 - DNA, 19 bp, Homo sapiens
cagtggccctggacttgct

SEQ ID NO: 10058 - DNA, 19 bp, Homo sapiens
gcagtggccctggacttgc

SEQ ID NO: 10059 - DNA, 19 bp, Homo sapiens
ggcagtggccctggacttg

SEQ ID NO: 10060 - DNA, 19 bp, Homo sapiens
gggcagtggccctggactt

SEQ ID NO: 10061 - DNA, 19 bp, Homo sapiens
tgggcagtggccctggact

SEQ ID NO: 10062 - DNA, 19 bp, Homo sapiens
ctgggcagtggccctggac

SEQ ID NO: 10063 - DNA, 19 bp, Homo sapiens
gctgggcagtggccctgga

SEQ ID NO: 10064 - DNA, 19 bp, Homo sapiens
ggctgggcagtggccctgg

SEQ ID NO: 10065 - DNA, 19 bp, Homo sapiens
cggctgggcagtggccctg

SEQ ID NO: 10066 - DNA, 19 bp, Homo sapiens
ccggctgggcagtggccct

SEQ ID NO: 10067 - DNA, 19 bp, Homo sapiens
gccggctgggcagtggccc

SEQ ID NO: 10068 - DNA, 19 bp, Homo sapiens
ggccggctgggcagtggcc

SEQ ID NO: 10069 - DNA, 19 bp, Homo sapiens
gggccggctgggcagtggc

SEQ ID NO: 10070 - DNA, 19 bp, Homo sapiens
ggggccggctgggcagtgg

SEQ ID NO: 10071 - DNA, 19 bp, Homo sapiens
cggggccggctgggcagtg

SEQ ID NO: 10072 - DNA, 19 bp, Homo sapiens
ccggggccggctgggcagt

SEQ ID NO: 10073 - DNA, 19 bp, Homo sapiens
gccggggccggctgggcag

SEQ ID NO: 10074 - DNA, 19 bp, Homo sapiens
ggccggggccggctgggca

SEQ ID NO: 10075 - DNA, 19 bp, Homo sapiens
gggccggggccggctgggc

SEQ ID NO: 10076 - DNA, 19 bp, Homo sapiens
agggccggggccggctggg

SEQ ID NO: 10077 - DNA, 19 bp, Homo sapiens
cagggccggggccggctgg

SEQ ID NO: 10078 - DNA, 19 bp, Homo sapiens
ccagggccggggccggctg

SEQ ID NO: 10079 - DNA, 19 bp, Homo sapiens
cccagggccggggccggct

SEQ ID NO: 10080 - DNA, 19 bp, Homo sapiens
gcccagggccggggccggc

SEQ ID NO: 10081 - DNA, 19 bp, Homo sapiens
ggcccagggccggggccgg

SEQ ID NO: 10082 - DNA, 19 bp, Homo sapiens
gggcccagggccggggccg

SEQ ID NO: 10083 - DNA, 19 bp, Homo sapiens
agggcccagggccggggcc

SEQ ID NO: 10084 - DNA, 19 bp, Homo sapiens
aagggcccagggccggggc

SEQ ID NO: 10085 - DNA, 19 bp, Homo sapiens
gaagggcccagggccgggg

SEQ ID NO: 10086 - DNA, 19 bp, Homo sapiens
tgaagggcccagggccggg

SEQ ID NO: 10087 - DNA, 19 bp, Homo sapiens
ctgaagggcccagggccgg

SEQ ID NO: 10088 - DNA, 19 bp, Homo sapiens
cctgaagggcccagggccg

SEQ ID NO: 10089 - DNA, 19 bp, Homo sapiens
gcctgaagggcccagggcc

SEQ ID NO: 10090 - DNA, 19 bp, Homo sapiens
agcctgaagggcccagggc

SEQ ID NO: 10091 - DNA, 19 bp, Homo sapiens
gagcctgaagggcccaggg

SEQ ID NO: 10092 - DNA, 19 bp, Homo sapiens
agagcctgaagggcccagg

SEQ ID NO: 10093 - DNA, 19 bp, Homo sapiens
gagagcctgaagggcccag

SEQ ID NO: 10094 - DNA, 19 bp, Homo sapiens
tgagagcctgaagggccca

SEQ ID NO: 10095 - DNA, 19 bp, Homo sapiens
gtgagagcctgaagggccc

SEQ ID NO: 10096 - DNA, 19 bp, Homo sapiens
ggtgagagcctgaagggcc

SEQ ID NO: 10097 - DNA, 19 bp, Homo sapiens
gggtgagagcctgaagggc

SEQ ID NO: 10098 - DNA, 19 bp, Homo sapiens
agggtgagagcctgaaggg

SEQ ID NO: 10099 - DNA, 19 bp, Homo sapiens
gagggtgagagcctgaagg

SEQ ID NO: 10100 - DNA, 19 bp, Homo sapiens
tgagggtgagagcctgaag

SEQ ID NO: 10101 - DNA, 19 bp, Homo sapiens
ctgagggtgagagcctgaa

SEQ ID NO: 10102 - DNA, 19 bp, Homo sapiens
tctgagggtgagagcctga

SEQ ID NO: 10103 - DNA, 19 bp, Homo sapiens
gtctgagggtgagagcctg

SEQ ID NO: 10104 - DNA, 19 bp, Homo sapiens
tgtctgagggtgagagcct

SEQ ID NO: 10105 - DNA, 19 bp, Homo sapiens
ttgtctgagggtgagagcc

SEQ ID NO: 10106 - DNA, 19 bp, Homo sapiens
cttgtctgagggtgagagc

SEQ ID NO: 10107 - DNA, 19 bp, Homo sapiens
acttgtctgagggtgagag

SEQ ID NO: 10108 - DNA, 19 bp, Homo sapiens
tacttgtctgagggtgaga

SEQ ID NO: 10109 - DNA, 19 bp, Homo sapiens
atacttgtctgagggtgag

SEQ ID NO: 10110 - DNA, 19 bp, Homo sapiens
gatacttgtctgagggtga

SEQ ID NO: 10111 - DNA, 19 bp, Homo sapiens
ggatacttgtctgagggtg

SEQ ID NO: 10112 - DNA, 19 bp, Homo sapiens
aggatacttgtctgagggt

SEQ ID NO: 10113 - DNA, 19 bp, Homo sapiens
caggatacttgtctgaggg

SEQ ID NO: 10114 - DNA, 19 bp, Homo sapiens
ccaggatacttgtctgagg

SEQ ID NO: 10115 - DNA, 19 bp, Homo sapiens
gccaggatacttgtctgag

SEQ ID NO: 10116 - DNA, 19 bp, Homo sapiens
agccaggatacttgtctga

SEQ ID NO: 10117 - DNA, 19 bp, Homo sapiens
aagccaggatacttgtctg

SEQ ID NO: 10118 - DNA, 19 bp, Homo sapiens
aaagccaggatacttgtct

SEQ ID NO: 10119 - DNA, 19 bp, Homo sapiens
caaagccaggatacttgtc

SEQ ID NO: 10120 - DNA, 19 bp, Homo sapiens
ccaaagccaggatacttgt

SEQ ID NO: 10121 - DNA, 19 bp, Homo sapiens
gccaaagccaggatacttg

SEQ ID NO: 10122 - DNA, 19 bp, Homo sapiens
agccaaagccaggatactt

SEQ ID NO: 10123 - DNA, 19 bp, Homo sapiens
aagccaaagccaggatact

SEQ ID NO: 10124 - DNA, 19 bp, Homo sapiens
aaagccaaagccaggatac

SEQ ID NO: 10125 - DNA, 19 bp, Homo sapiens
caaagccaaagccaggata

SEQ ID NO: 10126 - DNA, 19 bp, Homo sapiens
tcaaagccaaagccaggat

SEQ ID NO: 10127 - DNA, 19 bp, Homo sapiens
ctcaaagccaaagccagga

SEQ ID NO: 10128 - DNA, 19 bp, Homo sapiens
cctcaaagccaaagccagg

SEQ ID NO: 10129 - DNA, 19 bp, Homo sapiens
tcctcaaagccaaagccag

SEQ ID NO: 10130 - DNA, 19 bp, Homo sapiens
ctcctcaaagccaaagcca

SEQ ID NO: 10131 - DNA, 19 bp, Homo sapiens
cctcctcaaagccaaagcc

SEQ ID NO: 10132 - DNA, 19 bp, Homo sapiens
gcctcctcaaagccaaagc

SEQ ID NO: 10133 - DNA, 19 bp, Homo sapiens
ggcctcctcaaagccaaag

SEQ ID NO: 10134 - DNA, 19 bp, Homo sapiens
cggcctcctcaaagccaaa

SEQ ID NO: 10135 - DNA, 19 bp, Homo sapiens
gcggcctcctcaaagccaa

SEQ ID NO: 10136 - DNA, 19 bp, Homo sapiens
tgcggcctcctcaaagcca

SEQ ID NO: 10137 - DNA, 19 bp, Homo sapiens
ctgcggcctcctcaaagcc

SEQ ID NO: 10138 - DNA, 19 bp, Homo sapiens
gctgcggcctcctcaaagc

SEQ ID NO: 10139 - DNA, 19 bp, Homo sapiens
tgctgcggcctcctcaaag

SEQ ID NO: 10140 - DNA, 19 bp, Homo sapiens
ttgctgcggcctcctcaaa

SEQ ID NO: 10141 - DNA, 19 bp, Homo sapiens
cttgctgcggcctcctcaa

SEQ ID NO: 10142 - DNA, 19 bp, Homo sapiens
gcttgctgcggcctcctca

SEQ ID NO: 10143 - DNA, 19 bp, Homo sapiens
tgcttgctgcggcctcctc

SEQ ID NO: 10144 - DNA, 19 bp, Homo sapiens
ctgcttgctgcggcctcct

SEQ ID NO: 10145 - DNA, 19 bp, Homo sapiens
gctgcttgctgcggcctcc

SEQ ID NO: 10146 - DNA, 19 bp, Homo sapiens
ggctgcttgctgcggcctc

SEQ ID NO: 10147 - DNA, 19 bp, Homo sapiens
gggctgcttgctgcggcct

SEQ ID NO: 10148 - DNA, 19 bp, Homo sapiens
agggctgcttgctgcggcc

SEQ ID NO: 10149 - DNA, 19 bp, Homo sapiens
cagggctgcttgctgcggc

SEQ ID NO: 10150 - DNA, 19 bp, Homo sapiens
ccagggctgcttgctgcgg

SEQ ID NO: 10151 - DNA, 19 bp, Homo sapiens
cccagggctgcttgctgcg

SEQ ID NO: 10152 - DNA, 19 bp, Homo sapiens
gcccagggctgcttgctgc

SEQ ID NO: 10153 - DNA, 19 bp, Homo sapiens
cgcccagggctgcttgctg

SEQ ID NO: 10154 - DNA, 19 bp, Homo sapiens
tcgcccagggctgcttgct

SEQ ID NO: 10155 - DNA, 19 bp, Homo sapiens
atcgcccagggctgcttgc

SEQ ID NO: 10156 - DNA, 19 bp, Homo sapiens
aatcgcccagggctgcttg

SEQ ID NO: 10157 - DNA, 19 bp, Homo sapiens
gaatcgcccagggctgctt

SEQ ID NO: 10158 - DNA, 19 bp, Homo sapiens
ggaatcgcccagggctgct

SEQ ID NO: 10159 - DNA, 19 bp, Homo sapiens
aggaatcgcccagggctgc

SEQ ID NO: 10160 - DNA, 19 bp, Homo sapiens
gaggaatcgcccagggctg

SEQ ID NO: 10161 - DNA, 19 bp, Homo sapiens
tgaggaatcgcccagggct

SEQ ID NO: 10162 - DNA, 19 bp, Homo sapiens
ttgaggaatcgcccagggc

SEQ ID NO: 10163 - DNA, 19 bp, Homo sapiens
cttgaggaatcgcccaggg

SEQ ID NO: 10164 - DNA, 19 bp, Homo sapiens
ccttgaggaatcgcccagg

SEQ ID NO: 10165 - DNA, 19 bp, Homo sapiens
cccttgaggaatcgcccag

SEQ ID NO: 10166 - DNA, 19 bp, Homo sapiens
gcccttgaggaatcgccca

SEQ ID NO: 10167 - DNA, 19 bp, Homo sapiens
tgcccttgaggaatcgccc

SEQ ID NO: 10168 - DNA, 19 bp, Homo sapiens
ctgcccttgaggaatcgcc

SEQ ID NO: 10169 - DNA, 19 bp, Homo sapiens
gctgcccttgaggaatcgc

SEQ ID NO: 10170 - DNA, 19 bp, Homo sapiens
ggctgcccttgaggaatcg

SEQ ID NO: 10171 - DNA, 19 bp, Homo sapiens
tggctgcccttgaggaatc

SEQ ID NO: 10172 - DNA, 19 bp, Homo sapiens
gtggctgcccttgaggaat

SEQ ID NO: 10173 - DNA, 19 bp, Homo sapiens
cgtggctgcccttgaggaa

SEQ ID NO: 10174 - DNA, 19 bp, Homo sapiens
gcgtggctgcccttgagga

SEQ ID NO: 10175 - DNA, 19 bp, Homo sapiens
cgcgtggctgcccttgagg

SEQ ID NO: 10176 - DNA, 19 bp, Homo sapiens
gcgcgtggctgcccttgag

SEQ ID NO: 10177 - DNA, 19 bp, Homo sapiens
ggcgcgtggctgcccttga

SEQ ID NO: 10178 - DNA, 19 bp, Homo sapiens
gggcgcgtggctgcccttg

SEQ ID NO: 10179 - DNA, 19 bp, Homo sapiens
agggcgcgtggctgccctt

SEQ ID NO: 10180 - DNA, 19 bp, Homo sapiens
aagggcgcgtggctgccct

SEQ ID NO: 10181 - DNA, 19 bp, Homo sapiens
gaagggcgcgtggctgccc

SEQ ID NO: 10182 - DNA, 19 bp, Homo sapiens
ggaagggcgcgtggctgcc

SEQ ID NO: 10183 - DNA, 19 bp, Homo sapiens
tggaagggcgcgtggctgc

SEQ ID NO: 10184 - DNA, 19 bp, Homo sapiens
gtggaagggcgcgtggctg

SEQ ID NO: 10185 - DNA, 19 bp, Homo sapiens
ggtggaagggcgcgtggct

SEQ ID NO: 10186 - DNA, 19 bp, Homo sapiens
gggtggaagggcgcgtggc

SEQ ID NO: 10187 - DNA, 19 bp, Homo sapiens
cgggtggaagggcgcgtgg

SEQ ID NO: 10188 - DNA, 19 bp, Homo sapiens
acgggtggaagggcgcgtg

SEQ ID NO: 10189 - DNA, 19 bp, Homo sapiens
tacgggtggaagggcgcgt

SEQ ID NO: 10190 - DNA, 19 bp, Homo sapiens
gtacgggtggaagggcgcg

SEQ ID NO: 10191 - DNA, 19 bp, Homo sapiens
tgtacgggtggaagggcgc

SEQ ID NO: 10192 - DNA, 19 bp, Homo sapiens
ttgtacgggtggaagggcg

SEQ ID NO: 10193 - DNA, 19 bp, Homo sapiens
cttgtacgggtggaagggc

SEQ ID NO: 10194 - DNA, 19 bp, Homo sapiens
gcttgtacgggtggaaggg

SEQ ID NO: 10195 - DNA, 19 bp, Homo sapiens
cgcttgtacgggtggaagg

SEQ ID NO: 10196 - DNA, 19 bp, Homo sapiens
ccgcttgtacgggtggaag

SEQ ID NO: 10197 - DNA, 19 bp, Homo sapiens
gccgcttgtacgggtggaa

SEQ ID NO: 10198 - DNA, 19 bp, Homo sapiens
ggccgcttgtacgggtgga

SEQ ID NO: 10199 - DNA, 19 bp, Homo sapiens
aggccgcttgtacgggtgg

SEQ ID NO: 10200 - DNA, 19 bp, Homo sapiens
aaggccgcttgtacgggtg

SEQ ID NO: 10201 - DNA, 19 bp, Homo sapiens
aaaggccgcttgtacgggt

SEQ ID NO: 10202 - DNA, 19 bp, Homo sapiens
gaaaggccgcttgtacggg

SEQ ID NO: 10203 - DNA, 19 bp, Homo sapiens
ggaaaggccgcttgtacgg

SEQ ID NO: 10204 - DNA, 19 bp, Homo sapiens
tggaaaggccgcttgtacg

SEQ ID NO: 10205 - DNA, 19 bp, Homo sapiens
atggaaaggccgcttgtac

SEQ ID NO: 10206 - DNA, 19 bp, Homo sapiens
catggaaaggccgcttgta

SEQ ID NO: 10207 - DNA, 19 bp, Homo sapiens
tcatggaaaggccgcttgt

SEQ ID NO: 10208 - DNA, 19 bp, Homo sapiens
ctcatggaaaggccgcttg

SEQ ID NO: 10209 - DNA, 19 bp, Homo sapiens
cctcatggaaaggccgctt

SEQ ID NO: 10210 - DNA, 19 bp, Homo sapiens
tcctcatggaaaggccgct

SEQ ID NO: 10211 - DNA, 19 bp, Homo sapiens
gtcctcatggaaaggccgc

SEQ ID NO: 10212 - DNA, 19 bp, Homo sapiens
cgtcctcatggaaaggccg

SEQ ID NO: 10213 - DNA, 19 bp, Homo sapiens
acgtcctcatggaaaggcc

SEQ ID NO: 10214 - DNA, 19 bp, Homo sapiens
gacgtcctcatggaaaggc

SEQ ID NO: 10215 - DNA, 19 bp, Homo sapiens
agacgtcctcatggaaagg

SEQ ID NO: 10216 - DNA, 19 bp, Homo sapiens
aagacgtcctcatggaaag

SEQ ID NO: 10217 - DNA, 19 bp, Homo sapiens
gaagacgtcctcatggaaa

SEQ ID NO: 10218 - DNA, 19 bp, Homo sapiens
ggaagacgtcctcatggaa

SEQ ID NO: 10219 - DNA, 19 bp, Homo sapiens
gggaagacgtcctcatgga

SEQ ID NO: 10220 - DNA, 19 bp, Homo sapiens
tgggaagacgtcctcatgg

SEQ ID NO: 10221 - DNA, 19 bp, Homo sapiens
ctgggaagacgtcctcatg

SEQ ID NO: 10222 - DNA, 19 bp, Homo sapiens
tctgggaagacgtcctcat

SEQ ID NO: 10223 - DNA, 19 bp, Homo sapiens
ctctgggaagacgtcctca

SEQ ID NO: 10224 - DNA, 19 bp, Homo sapiens
cctctgggaagacgtcctc

SEQ ID NO: 10225 - DNA, 19 bp, Homo sapiens
gcctctgggaagacgtcct

SEQ ID NO: 10226 - DNA, 19 bp, Homo sapiens
ggcctctgggaagacgtcc

SEQ ID NO: 10227 - DNA, 19 bp, Homo sapiens
cggcctctgggaagacgtc

SEQ ID NO: 10228 - DNA, 19 bp, Homo sapiens
tcggcctctgggaagacgt

SEQ ID NO: 10229 - DNA, 19 bp, Homo sapiens
ctcggcctctgggaagacg

SEQ ID NO: 10230 - DNA, 19 bp, Homo sapiens
tctcggcctctgggaagac

SEQ ID NO: 10231 - DNA, 19 bp, Homo sapiens
gtctcggcctctgggaaga

SEQ ID NO: 10232 - DNA, 19 bp, Homo sapiens
ggtctcggcctctgggaag

SEQ ID NO: 10233 - DNA, 19 bp, Homo sapiens
tggtctcggcctctgggaa

SEQ ID NO: 10234 - DNA, 19 bp, Homo sapiens
gtggtctcggcctctggga

SEQ ID NO: 10235 - DNA, 19 bp, Homo sapiens
ggtggtctcggcctctggg

SEQ ID NO: 10236 - DNA, 19 bp, Homo sapiens
gggtggtctcggcctctgg

SEQ ID NO: 10237 - DNA, 19 bp, Homo sapiens
agggtggtctcggcctctg

SEQ ID NO: 10238 - DNA, 19 bp, Homo sapiens
cagggtggtctcggcctct

SEQ ID NO: 10239 - DNA, 19 bp, Homo sapiens
ccagggtggtctcggcctc

SEQ ID NO: 10240 - DNA, 19 bp, Homo sapiens
gccagggtggtctcggcct

SEQ ID NO: 10241 - DNA, 19 bp, Homo sapiens
ggccagggtggtctcggcc

SEQ ID NO: 10242 - DNA, 19 bp, Homo sapiens
gggccagggtggtctcggc

SEQ ID NO: 10243 - DNA, 19 bp, Homo sapiens
agggccagggtggtctcgg

SEQ ID NO: 10244 - DNA, 19 bp, Homo sapiens
gagggccagggtggtctcg

SEQ ID NO: 10245 - DNA, 19 bp, Homo sapiens
tgagggccagggtggtctc

SEQ ID NO: 10246 - DNA, 19 bp, Homo sapiens
ttgagggccagggtggtct

SEQ ID NO: 10247 - DNA, 19 bp, Homo sapiens
tttgagggccagggtggtc

SEQ ID NO: 10248 - DNA, 19 bp, Homo sapiens
ctttgagggccagggtggt

SEQ ID NO: 10249 - DNA, 19 bp, Homo sapiens
cctttgagggccagggtgg

SEQ ID NO: 10250 - DNA, 19 bp, Homo sapiens
tcctttgagggccagggtg

SEQ ID NO: 10251 - DNA, 19 bp, Homo sapiens
gtcctttgagggccagggt

SEQ ID NO: 10252 - DNA, 19 bp, Homo sapiens
tgtcctttgagggccaggg

SEQ ID NO: 10253 - DNA, 19 bp, Homo sapiens
gtgtcctttgagggccagg

SEQ ID NO: 10254 - DNA, 19 bp, Homo sapiens
agtgtcctttgagggccag

SEQ ID NO: 10255 - DNA, 19 bp, Homo sapiens
gagtgtcctttgagggcca

SEQ ID NO: 10256 - DNA, 19 bp, Homo sapiens
ggagtgtcctttgagggcc

SEQ ID NO: 10257 - DNA, 19 bp, Homo sapiens
aggagtgtcctttgagggc

SEQ ID NO: 10258 - DNA, 19 bp, Homo sapiens
aaggagtgtcctttgaggg

SEQ ID NO: 10259 - DNA, 19 bp, Homo sapiens
aaaggagtgtcctttgagg

SEQ ID NO: 10260 - DNA, 19 bp, Homo sapiens
taaaggagtgtcctttgag

SEQ ID NO: 10261 - DNA, 19 bp, Homo sapiens
ttaaaggagtgtcctttga

SEQ ID NO: 10262 - DNA, 19 bp, Homo sapiens
cttaaaggagtgtcctttg

SEQ ID NO: 10263 - DNA, 19 bp, Homo sapiens
tcttaaaggagtgtccttt

SEQ ID NO: 10264 - DNA, 19 bp, Homo sapiens
gtcttaaaggagtgtcctt

SEQ ID NO: 10265 - DNA, 19 bp, Homo sapiens
ggtcttaaaggagtgtcct

SEQ ID NO: 10266 - DNA, 19 bp, Homo sapiens
gggtcttaaaggagtgtcc

SEQ ID NO: 10267 - DNA, 19 bp, Homo sapiens
ggggtcttaaaggagtgtc

SEQ ID NO: 10268 - DNA, 19 bp, Homo sapiens
tggggtcttaaaggagtgt

SEQ ID NO: 10269 - DNA, 19 bp, Homo sapiens
ctggggtcttaaaggagtg

SEQ ID NO: 10270 - DNA, 19 bp, Homo sapiens
cctggggtcttaaaggagt

SEQ ID NO: 10271 - DNA, 19 bp, Homo sapiens
ccctggggtcttaaaggag

SEQ ID NO: 10272 - DNA, 19 bp, Homo sapiens
gccctggggtcttaaagga

SEQ ID NO: 10273 - DNA, 19 bp, Homo sapiens
ggccctggggtcttaaagg

SEQ ID NO: 10274 - DNA, 19 bp, Homo sapiens
cggccctggggtcttaaag

SEQ ID NO: 10275 - DNA, 19 bp, Homo sapiens
gcggccctggggtcttaaa

SEQ ID NO: 10276 - DNA, 19 bp, Homo sapiens
agcggccctggggtcttaa

SEQ ID NO: 10277 - DNA, 19 bp, Homo sapiens
cagcggccctggggtctta

SEQ ID NO: 10278 - DNA, 19 bp, Homo sapiens
ccagcggccctggggtctt

SEQ ID NO: 10279 - DNA, 19 bp, Homo sapiens
tccagcggccctggggtct

SEQ ID NO: 10280 - DNA, 19 bp, Homo sapiens
ctccagcggccctggggtc

SEQ ID NO: 10281 - DNA, 19 bp, Homo sapiens
cctccagcggccctggggt

SEQ ID NO: 10282 - DNA, 19 bp, Homo sapiens
gcctccagcggccctgggg

SEQ ID NO: 10283 - DNA, 19 bp, Homo sapiens
ggcctccagcggccctggg

SEQ ID NO: 10284 - DNA, 19 bp, Homo sapiens
aggcctccagcggccctgg

SEQ ID NO: 10285 - DNA, 19 bp, Homo sapiens
aaggcctccagcggccctg

SEQ ID NO: 10286 - DNA, 19 bp, Homo sapiens
gaaggcctccagcggccct

SEQ ID NO: 10287 - DNA, 19 bp, Homo sapiens
cgaaggcctccagcggccc

SEQ ID NO: 10288 - DNA, 19 bp, Homo sapiens
tcgaaggcctccagcggcc

SEQ ID NO: 10289 - DNA, 19 bp, Homo sapiens
ctcgaaggcctccagcggc

SEQ ID NO: 10290 - DNA, 19 bp, Homo sapiens
cctcgaaggcctccagcgg

SEQ ID NO: 10291 - DNA, 19 bp, Homo sapiens
tcctcgaaggcctccagcg

SEQ ID NO: 10292 - DNA, 19 bp, Homo sapiens
ctcctcgaaggcctccagc

SEQ ID NO: 10293 - DNA, 19 bp, Homo sapiens
tctcctcgaaggcctccag

SEQ ID NO: 10294 - DNA, 19 bp, Homo sapiens
atctcctcgaaggcctcca

SEQ ID NO: 10295 - DNA, 19 bp, Homo sapiens
gatctcctcgaaggcctcc

SEQ ID NO: 10296 - DNA, 19 bp, Homo sapiens
ggatctcctcgaaggcctc

SEQ ID NO: 10297 - DNA, 19 bp, Homo sapiens
gggatctcctcgaaggcct

SEQ ID NO: 10298 - DNA, 19 bp, Homo sapiens
tgggatctcctcgaaggcc

SEQ ID NO: 10299 - DNA, 19 bp, Homo sapiens
ctgggatctcctcgaaggc

SEQ ID NO: 10300 - DNA, 19 bp, Homo sapiens
actgggatctcctcgaagg

SEQ ID NO: 10301 - DNA, 19 bp, Homo sapiens
cactgggatctcctcgaag

SEQ ID NO: 10302 - DNA, 19 bp, Homo sapiens
ccactgggatctcctcgaa

SEQ ID NO: 10303 - DNA, 19 bp, Homo sapiens
tccactgggatctcctcga

SEQ ID NO: 10304 - DNA, 19 bp, Homo sapiens
gtccactgggatctcctcg

SEQ ID NO: 10305 - DNA, 19 bp, Homo sapiens
cgtccactgggatctcctc

SEQ ID NO: 10306 - DNA, 19 bp, Homo sapiens
acgtccactgggatctcct

SEQ ID NO: 10307 - DNA, 19 bp, Homo sapiens
cacgtccactgggatctcc

SEQ ID NO: 10308 - DNA, 19 bp, Homo sapiens
ccacgtccactgggatctc

SEQ ID NO: 10309 - DNA, 19 bp, Homo sapiens
gccacgtccactgggatct

SEQ ID NO: 10310 - DNA, 19 bp, Homo sapiens
cgccacgtccactgggatc

SEQ ID NO: 10311 - DNA, 19 bp, Homo sapiens
ccgccacgtccactgggat

SEQ ID NO: 10312 - DNA, 19 bp, Homo sapiens
tccgccacgtccactggga

SEQ ID NO: 10313 - DNA, 19 bp, Homo sapiens
ctccgccacgtccactggg

SEQ ID NO: 10314 - DNA, 19 bp, Homo sapiens
cctccgccacgtccactgg

SEQ ID NO: 10315 - DNA, 19 bp, Homo sapiens
gcctccgccacgtccactg

SEQ ID NO: 10316 - DNA, 19 bp, Homo sapiens
ggcctccgccacgtccact

SEQ ID NO: 10317 - DNA, 19 bp, Homo sapiens
cggcctccgccacgtccac

SEQ ID NO: 10318 - DNA, 19 bp, Homo sapiens
tcggcctccgccacgtcca

SEQ ID NO: 10319 - DNA, 19 bp, Homo sapiens
ctcggcctccgccacgtcc

SEQ ID NO: 10320 - DNA, 19 bp, Homo sapiens
cctcggcctccgccacgtc

SEQ ID NO: 10321 - DNA, 19 bp, Homo sapiens
gcctcggcctccgccacgt

SEQ ID NO: 10322 - DNA, 19 bp, Homo sapiens
ggcctcggcctccgccacg

SEQ ID NO: 10323 - DNA, 19 bp, Homo sapiens
aggcctcggcctccgccac

SEQ ID NO: 10324 - DNA, 19 bp, Homo sapiens
aaggcctcggcctccgcca

SEQ ID NO: 10325 - DNA, 19 bp, Homo sapiens
gaaggcctcggcctccgcc

SEQ ID NO: 10326 - DNA, 19 bp, Homo sapiens
ggaaggcctcggcctccgc

SEQ ID NO: 10327 - DNA, 19 bp, Homo sapiens
aggaaggcctcggcctccg

SEQ ID NO: 10328 - DNA, 19 bp, Homo sapiens
caggaaggcctcggcctcc

SEQ ID NO: 10329 - DNA, 19 bp, Homo sapiens
gcaggaaggcctcggcctc

SEQ ID NO: 10330 - DNA, 19 bp, Homo sapiens
ggcaggaaggcctcggcct

SEQ ID NO: 10331 - DNA, 19 bp, Homo sapiens
aggcaggaaggcctcggcc

SEQ ID NO: 10332 - DNA, 19 bp, Homo sapiens
caggcaggaaggcctcggc

SEQ ID NO: 10333 - DNA, 19 bp, Homo sapiens
ccaggcaggaaggcctcgg

SEQ ID NO: 10334 - DNA, 19 bp, Homo sapiens
gccaggcaggaaggcctcg

SEQ ID NO: 10335 - DNA, 19 bp, Homo sapiens
agccaggcaggaaggcctc

SEQ ID NO: 10336 - DNA, 19 bp, Homo sapiens
aagccaggcaggaaggcct

SEQ ID NO: 10337 - DNA, 19 bp, Homo sapiens
gaagccaggcaggaaggcc

SEQ ID NO: 10338 - DNA, 19 bp, Homo sapiens
agaagccaggcaggaaggc

SEQ ID NO: 10339 - DNA, 19 bp, Homo sapiens
gagaagccaggcaggaagg

SEQ ID NO: 10340 - DNA, 19 bp, Homo sapiens
tgagaagccaggcaggaag

SEQ ID NO: 10341 - DNA, 19 bp, Homo sapiens
ctgagaagccaggcaggaa

SEQ ID NO: 10342 - DNA, 19 bp, Homo sapiens
gctgagaagccaggcagga

SEQ ID NO: 10343 - DNA, 19 bp, Homo sapiens
tgctgagaagccaggcagg

SEQ ID NO: 10344 - DNA, 19 bp, Homo sapiens
ctgctgagaagccaggcag

SEQ ID NO: 10345 - DNA, 19 bp, Homo sapiens
tctgctgagaagccaggca

SEQ ID NO: 10346 - DNA, 19 bp, Homo sapiens
ctctgctgagaagccaggc

SEQ ID NO: 10347 - DNA, 19 bp, Homo sapiens
cctctgctgagaagccagg

SEQ ID NO: 10348 - DNA, 19 bp, Homo sapiens
gcctctgctgagaagccag

SEQ ID NO: 10349 - DNA, 19 bp, Homo sapiens
ggcctctgctgagaagcca

SEQ ID NO: 10350 - DNA, 19 bp, Homo sapiens
aggcctctgctgagaagcc

SEQ ID NO: 10351 - DNA, 19 bp, Homo sapiens
caggcctctgctgagaagc

SEQ ID NO: 10352 - DNA, 19 bp, Homo sapiens
ccaggcctctgctgagaag

SEQ ID NO: 10353 - DNA, 19 bp, Homo sapiens
accaggcctctgctgagaa

SEQ ID NO: 10354 - DNA, 19 bp, Homo sapiens
caccaggcctctgctgaga

SEQ ID NO: 10355 - DNA, 19 bp, Homo sapiens
acaccaggcctctgctgag

SEQ ID NO: 10356 - DNA, 19 bp, Homo sapiens
tacaccaggcctctgctga

SEQ ID NO: 10357 - DNA, 19 bp, Homo sapiens
ttacaccaggcctctgctg

SEQ ID NO: 10358 - DNA, 19 bp, Homo sapiens
gttacaccaggcctctgct

SEQ ID NO: 10359 - DNA, 19 bp, Homo sapiens
cgttacaccaggcctctgc

SEQ ID NO: 10360 - DNA, 19 bp, Homo sapiens
ccgttacaccaggcctctg

SEQ ID NO: 10361 - DNA, 19 bp, Homo sapiens
cccgttacaccaggcctct

SEQ ID NO: 10362 - DNA, 19 bp, Homo sapiens
gcccgttacaccaggcctc

SEQ ID NO: 10363 - DNA, 19 bp, Homo sapiens
agcccgttacaccaggcct

SEQ ID NO: 10364 - DNA, 19 bp, Homo sapiens
gagcccgttacaccaggcc

SEQ ID NO: 10365 - DNA, 19 bp, Homo sapiens
ggagcccgttacaccaggc

SEQ ID NO: 10366 - DNA, 19 bp, Homo sapiens
gggagcccgttacaccagg

SEQ ID NO: 10367 - DNA, 19 bp, Homo sapiens
ggggagcccgttacaccag

SEQ ID NO: 10368 - DNA, 19 bp, Homo sapiens
aggggagcccgttacacca

SEQ ID NO: 10369 - DNA, 19 bp, Homo sapiens
taggggagcccgttacacc

SEQ ID NO: 10370 - DNA, 19 bp, Homo sapiens
gtaggggagcccgttacac

SEQ ID NO: 10371 - DNA, 19 bp, Homo sapiens
ggtaggggagcccgttaca

SEQ ID NO: 10372 - DNA, 19 bp, Homo sapiens
gggtaggggagcccgttac

SEQ ID NO: 10373 - DNA, 19 bp, Homo sapiens
ggggtaggggagcccgtta

SEQ ID NO: 10374 - DNA, 19 bp, Homo sapiens
tggggtaggggagcccgtt

SEQ ID NO: 10375 - DNA, 19 bp, Homo sapiens
ctggggtaggggagcccgt

SEQ ID NO: 10376 - DNA, 19 bp, Homo sapiens
gctggggtaggggagcccg

SEQ ID NO: 10377 - DNA, 19 bp, Homo sapiens
ggctggggtaggggagccc

SEQ ID NO: 10378 - DNA, 19 bp, Homo sapiens
tggctggggtaggggagcc

SEQ ID NO: 10379 - DNA, 19 bp, Homo sapiens
ctggctggggtaggggagc

SEQ ID NO: 10380 - DNA, 19 bp, Homo sapiens
cctggctggggtaggggag

SEQ ID NO: 10381 - DNA, 19 bp, Homo sapiens
tcctggctggggtagggga

SEQ ID NO: 10382 - DNA, 19 bp, Homo sapiens
ctcctggctggggtagggg

SEQ ID NO: 10383 - DNA, 19 bp, Homo sapiens
gctcctggctggggtaggg

SEQ ID NO: 10384 - DNA, 19 bp, Homo sapiens
tgctcctggctggggtagg

SEQ ID NO: 10385 - DNA, 19 bp, Homo sapiens
atgctcctggctggggtag

SEQ ID NO: 10386 - DNA, 19 bp, Homo sapiens
catgctcctggctggggta

SEQ ID NO: 10387 - DNA, 19 bp, Homo sapiens
ccatgctcctggctggggt

SEQ ID NO: 10388 - DNA, 19 bp, Homo sapiens
gccatgctcctggctgggg

SEQ ID NO: 10389 - DNA, 19 bp, Homo sapiens
ggccatgctcctggctggg

SEQ ID NO: 10390 - DNA, 19 bp, Homo sapiens
gggccatgctcctggctgg

SEQ ID NO: 10391 - DNA, 19 bp, Homo sapiens
ggggccatgctcctggctg

SEQ ID NO: 10392 - DNA, 19 bp, Homo sapiens
gggggccatgctcctggct

SEQ ID NO: 10393 - DNA, 19 bp, Homo sapiens
tgggggccatgctcctggc

SEQ ID NO: 10394 - DNA, 19 bp, Homo sapiens
ttgggggccatgctcctgg

SEQ ID NO: 10395 - DNA, 19 bp, Homo sapiens
cttgggggccatgctcctg

SEQ ID NO: 10396 - DNA, 19 bp, Homo sapiens
acttgggggccatgctcct

SEQ ID NO: 10397 - DNA, 19 bp, Homo sapiens
gacttgggggccatgctcc

SEQ ID NO: 10398 - DNA, 19 bp, Homo sapiens
ggacttgggggccatgctc

SEQ ID NO: 10399 - DNA, 19 bp, Homo sapiens
aggacttgggggccatgct

SEQ ID NO: 10400 - DNA, 19 bp, Homo sapiens
caggacttgggggccatgc

SEQ ID NO: 10401 - DNA, 19 bp, Homo sapiens
ccaggacttgggggccatg

SEQ ID NO: 10402 - DNA, 19 bp, Homo sapiens
cccaggacttgggggccat

SEQ ID NO: 10403 - DNA, 19 bp, Homo sapiens
acccaggacttgggggcca

SEQ ID NO: 10404 - DNA, 19 bp, Homo sapiens
aacccaggacttgggggcc

SEQ ID NO: 10405 - DNA, 19 bp, Homo sapiens
gaacccaggacttgggggc

SEQ ID NO: 10406 - DNA, 19 bp, Homo sapiens
tgaacccaggacttggggg

SEQ ID NO: 10407 - DNA, 19 bp, Homo sapiens
ctgaacccaggacttgggg

SEQ ID NO: 10408 - DNA, 19 bp, Homo sapiens
tctgaacccaggacttggg

SEQ ID NO: 10409 - DNA, 19 bp, Homo sapiens
ctctgaacccaggacttgg

SEQ ID NO: 10410 - DNA, 19 bp, Homo sapiens
cctctgaacccaggacttg

SEQ ID NO: 10411 - DNA, 19 bp, Homo sapiens
acctctgaacccaggactt

SEQ ID NO: 10412 - DNA, 19 bp, Homo sapiens
gacctctgaacccaggact

SEQ ID NO: 10413 - DNA, 19 bp, Homo sapiens
tgacctctgaacccaggac

SEQ ID NO: 10414 - DNA, 19 bp, Homo sapiens
ttgacctctgaacccagga

SEQ ID NO: 10415 - DNA, 19 bp, Homo sapiens
tttgacctctgaacccagg

SEQ ID NO: 10416 - DNA, 19 bp, Homo sapiens
ctttgacctctgaacccag

SEQ ID NO: 10417 - DNA, 19 bp, Homo sapiens
actttgacctctgaaccca

SEQ ID NO: 10418 - DNA, 19 bp, Homo sapiens
gactttgacctctgaaccc

SEQ ID NO: 10419 - DNA, 19 bp, Homo sapiens
tgactttgacctctgaacc

SEQ ID NO: 10420 - DNA, 19 bp, Homo sapiens
ttgactttgacctctgaac

SEQ ID NO: 10421 - DNA, 19 bp, Homo sapiens
cttgactttgacctctgaa

SEQ ID NO: 10422 - DNA, 19 bp, Homo sapiens
gcttgactttgacctctga

SEQ ID NO: 10423 - DNA, 19 bp, Homo sapiens
ggcttgactttgacctctg

SEQ ID NO: 10424 - DNA, 19 bp, Homo sapiens
gggcttgactttgacctct

SEQ ID NO: 10425 - DNA, 19 bp, Homo sapiens
ggggcttgactttgacctc

SEQ ID NO: 10426 - DNA, 19 bp, Homo sapiens
gggggcttgactttgacct

SEQ ID NO: 10427 - DNA, 19 bp, Homo sapiens
tgggggcttgactttgacc

SEQ ID NO: 10428 - DNA, 19 bp, Homo sapiens
ctgggggcttgactttgac

SEQ ID NO: 10429 - DNA, 19 bp, Homo sapiens
actgggggcttgactttga

SEQ ID NO: 10430 - DNA, 19 bp, Homo sapiens
aactgggggcttgactttg

SEQ ID NO: 10431 - DNA, 19 bp, Homo sapiens
gaactgggggcttgacttt

SEQ ID NO: 10432 - DNA, 19 bp, Homo sapiens
agaactgggggcttgactt

SEQ ID NO: 10433 - DNA, 19 bp, Homo sapiens
cagaactgggggcttgact

SEQ ID NO: 10434 - DNA, 19 bp, Homo sapiens
ccagaactgggggcttgac

SEQ ID NO: 10435 - DNA, 19 bp, Homo sapiens
tccagaactgggggcttga

SEQ ID NO: 10436 - DNA, 19 bp, Homo sapiens
ctccagaactgggggcttg

SEQ ID NO: 10437 - DNA, 19 bp, Homo sapiens
tctccagaactgggggctt

SEQ ID NO: 10438 - DNA, 19 bp, Homo sapiens
ctctccagaactgggggct

SEQ ID NO: 10439 - DNA, 19 bp, Homo sapiens
actctccagaactgggggc

SEQ ID NO: 10440 - DNA, 19 bp, Homo sapiens
cactctccagaactggggg

SEQ ID NO: 10441 - DNA, 19 bp, Homo sapiens
ccactctccagaactgggg

SEQ ID NO: 10442 - DNA, 19 bp, Homo sapiens
accactctccagaactggg

SEQ ID NO: 10443 - DNA, 19 bp, Homo sapiens
caccactctccagaactgg

SEQ ID NO: 10444 - DNA, 19 bp, Homo sapiens
gcaccactctccagaactg

SEQ ID NO: 10445 - DNA, 19 bp, Homo sapiens
agcaccactctccagaact

SEQ ID NO: 10446 - DNA, 19 bp, Homo sapiens
cagcaccactctccagaac

SEQ ID NO: 10447 - DNA, 19 bp, Homo sapiens
ccagcaccactctccagaa

SEQ ID NO: 10448 - DNA, 19 bp, Homo sapiens
cccagcaccactctccaga

SEQ ID NO: 10449 - DNA, 19 bp, Homo sapiens
tcccagcaccactctccag

SEQ ID NO: 10450 - DNA, 19 bp, Homo sapiens
atcccagcaccactctcca

SEQ ID NO: 10451 - DNA, 19 bp, Homo sapiens
catcccagcaccactctcc

SEQ ID NO: 10452 - DNA, 19 bp, Homo sapiens
acatcccagcaccactctc

SEQ ID NO: 10453 - DNA, 19 bp, Homo sapiens
aacatcccagcaccactct

SEQ ID NO: 10454 - DNA, 19 bp, Homo sapiens
gaacatcccagcaccactc

SEQ ID NO: 10455 - DNA, 19 bp, Homo sapiens
agaacatcccagcaccact

SEQ ID NO: 10456 - DNA, 19 bp, Homo sapiens
cagaacatcccagcaccac

SEQ ID NO: 10457 - DNA, 19 bp, Homo sapiens
gcagaacatcccagcacca

SEQ ID NO: 10458 - DNA, 19 bp, Homo sapiens
agcagaacatcccagcacc

SEQ ID NO: 10459 - DNA, 19 bp, Homo sapiens
tagcagaacatcccagcac

SEQ ID NO: 10460 - DNA, 19 bp, Homo sapiens
gtagcagaacatcccagca

SEQ ID NO: 10461 - DNA, 19 bp, Homo sapiens
ggtagcagaacatcccagc

SEQ ID NO: 10462 - DNA, 19 bp, Homo sapiens
tggtagcagaacatcccag

SEQ ID NO: 10463 - DNA, 19 bp, Homo sapiens
ctggtagcagaacatccca

SEQ ID NO: 10464 - DNA, 19 bp, Homo sapiens
gctggtagcagaacatccc

SEQ ID NO: 10465 - DNA, 19 bp, Homo sapiens
ggctggtagcagaacatcc

SEQ ID NO: 10466 - DNA, 19 bp, Homo sapiens
aggctggtagcagaacatc

SEQ ID NO: 10467 - DNA, 19 bp, Homo sapiens
gaggctggtagcagaacat

SEQ ID NO: 10468 - DNA, 19 bp, Homo sapiens
ggaggctggtagcagaaca

SEQ ID NO: 10469 - DNA, 19 bp, Homo sapiens
gggaggctggtagcagaac

SEQ ID NO: 10470 - DNA, 19 bp, Homo sapiens
agggaggctggtagcagaa

SEQ ID NO: 10471 - DNA, 19 bp, Homo sapiens
aagggaggctggtagcaga

SEQ ID NO: 10472 - DNA, 19 bp, Homo sapiens
caagggaggctggtagcag

SEQ ID NO: 10473 - DNA, 19 bp, Homo sapiens
gcaagggaggctggtagca

SEQ ID NO: 10474 - DNA, 19 bp, Homo sapiens
tgcaagggaggctggtagc

SEQ ID NO: 10475 - DNA, 19 bp, Homo sapiens
ctgcaagggaggctggtag

SEQ ID NO: 10476 - DNA, 19 bp, Homo sapiens
gctgcaagggaggctggta

SEQ ID NO: 10477 - DNA, 19 bp, Homo sapiens
tgctgcaagggaggctggt

SEQ ID NO: 10478 - DNA, 19 bp, Homo sapiens
atgctgcaagggaggctgg

SEQ ID NO: 10479 - DNA, 19 bp, Homo sapiens
tatgctgcaagggaggctg

SEQ ID NO: 10480 - DNA, 19 bp, Homo sapiens
atatgctgcaagggaggct

SEQ ID NO: 10481 - DNA, 19 bp, Homo sapiens
catatgctgcaagggaggc

SEQ ID NO: 10482 - DNA, 19 bp, Homo sapiens
acatatgctgcaagggagg

SEQ ID NO: 10483 - DNA, 19 bp, Homo sapiens
tacatatgctgcaagggag

SEQ ID NO: 10484 - DNA, 19 bp, Homo sapiens
gtacatatgctgcaaggga

SEQ ID NO: 10485 - DNA, 19 bp, Homo sapiens
agtacatatgctgcaaggg

SEQ ID NO: 10486 - DNA, 19 bp, Homo sapiens
cagtacatatgctgcaagg

SEQ ID NO: 10487 - DNA, 19 bp, Homo sapiens
gcagtacatatgctgcaag

SEQ ID NO: 10488 - DNA, 19 bp, Homo sapiens
agcagtacatatgctgcaa

SEQ ID NO: 10489 - DNA, 19 bp, Homo sapiens
gagcagtacatatgctgca

SEQ ID NO: 10490 - DNA, 19 bp, Homo sapiens
ggagcagtacatatgctgc

SEQ ID NO: 10491 - DNA, 19 bp, Homo sapiens
aggagcagtacatatgctg

SEQ ID NO: 10492 - DNA, 19 bp, Homo sapiens
gaggagcagtacatatgct

SEQ ID NO: 10493 - DNA, 19 bp, Homo sapiens
ggaggagcagtacatatgc

SEQ ID NO: 10494 - DNA, 19 bp, Homo sapiens
gggaggagcagtacatatg

SEQ ID NO: 10495 - DNA, 19 bp, Homo sapiens
tgggaggagcagtacatat

SEQ ID NO: 10496 - DNA, 19 bp, Homo sapiens
ctgggaggagcagtacata

SEQ ID NO: 10497 - DNA, 19 bp, Homo sapiens
gctgggaggagcagtacat

SEQ ID NO: 10498 - DNA, 19 bp, Homo sapiens
ggctgggaggagcagtaca

SEQ ID NO: 10499 - DNA, 19 bp, Homo sapiens
gggctgggaggagcagtac

SEQ ID NO: 10500 - DNA, 19 bp, Homo sapiens
ggggctgggaggagcagta

SEQ ID NO: 10501 - DNA, 19 bp, Homo sapiens
gggggctgggaggagcagt

SEQ ID NO: 10502 - DNA, 19 bp, Homo sapiens
ggggggctgggaggagcag

SEQ ID NO: 10503 - DNA, 19 bp, Homo sapiens
aggggggctgggaggagca

SEQ ID NO: 10504 - DNA, 19 bp, Homo sapiens
aaggggggctgggaggagc

SEQ ID NO: 10505 - DNA, 19 bp, Homo sapiens
gaaggggggctgggaggag

SEQ ID NO: 10506 - DNA, 19 bp, Homo sapiens
ggaaggggggctgggagga

SEQ ID NO: 10507 - DNA, 19 bp, Homo sapiens
tggaaggggggctgggagg

SEQ ID NO: 10508 - DNA, 19 bp, Homo sapiens
gtggaaggggggctgggag

SEQ ID NO: 10509 - DNA, 19 bp, Homo sapiens
ggtggaaggggggctggga

SEQ ID NO: 10510 - DNA, 19 bp, Homo sapiens
tggtggaaggggggctggg

SEQ ID NO: 10511 - DNA, 19 bp, Homo sapiens
ctggtggaaggggggctgg

SEQ ID NO: 10512 - DNA, 19 bp, Homo sapiens
actggtggaaggggggctg

SEQ ID NO: 10513 - DNA, 19 bp, Homo sapiens
tactggtggaaggggggct

SEQ ID NO: 10514 - DNA, 19 bp, Homo sapiens
gtactggtggaaggggggc

SEQ ID NO: 10515 - DNA, 19 bp, Homo sapiens
agtactggtggaagggggg

SEQ ID NO: 10516 - DNA, 19 bp, Homo sapiens
gagtactggtggaaggggg

SEQ ID NO: 10517 - DNA, 19 bp, Homo sapiens
cgagtactggtggaagggg

SEQ ID NO: 10518 - DNA, 19 bp, Homo sapiens
gcgagtactggtggaaggg

SEQ ID NO: 10519 - DNA, 19 bp, Homo sapiens
ggcgagtactggtggaagg

SEQ ID NO: 10520 - DNA, 19 bp, Homo sapiens
tggcgagtactggtggaag

SEQ ID NO: 10521 - DNA, 19 bp, Homo sapiens
ctggcgagtactggtggaa

SEQ ID NO: 10522 - DNA, 19 bp, Homo sapiens
cctggcgagtactggtgga

SEQ ID NO: 10523 - DNA, 19 bp, Homo sapiens
acctggcgagtactggtgg

SEQ ID NO: 10524 - DNA, 19 bp, Homo sapiens
cacctggcgagtactggtg

SEQ ID NO: 10525 - DNA, 19 bp, Homo sapiens
ccacctggcgagtactggt

SEQ ID NO: 10526 - DNA, 19 bp, Homo sapiens
accacctggcgagtactgg

SEQ ID NO: 10527 - DNA, 19 bp, Homo sapiens
caccacctggcgagtactg

SEQ ID NO: 10528 - DNA, 19 bp, Homo sapiens
ccaccacctggcgagtact

SEQ ID NO: 10529 - DNA, 19 bp, Homo sapiens
gccaccacctggcgagtac

SEQ ID NO: 10530 - DNA, 19 bp, Homo sapiens
tgccaccacctggcgagta

SEQ ID NO: 10531 - DNA, 19 bp, Homo sapiens
ctgccaccacctggcgagt

SEQ ID NO: 10532 - DNA, 19 bp, Homo sapiens
gctgccaccacctggcgag

SEQ ID NO: 10533 - DNA, 19 bp, Homo sapiens
agctgccaccacctggcga

SEQ ID NO: 10534 - DNA, 19 bp, Homo sapiens
tagctgccaccacctggcg

SEQ ID NO: 10535 - DNA, 19 bp, Homo sapiens
gtagctgccaccacctggc

SEQ ID NO: 10536 - DNA, 19 bp, Homo sapiens
ggtagctgccaccacctgg

SEQ ID NO: 10537 - DNA, 19 bp, Homo sapiens
gggtagctgccaccacctg

SEQ ID NO: 10538 - DNA, 19 bp, Homo sapiens
ggggtagctgccaccacct

SEQ ID NO: 10539 - DNA, 19 bp, Homo sapiens
tggggtagctgccaccacc

SEQ ID NO: 10540 - DNA, 19 bp, Homo sapiens
atggggtagctgccaccac

SEQ ID NO: 10541 - DNA, 19 bp, Homo sapiens
tatggggtagctgccacca

SEQ ID NO: 10542 - DNA, 19 bp, Homo sapiens
gtatggggtagctgccacc

SEQ ID NO: 10543 - DNA, 19 bp, Homo sapiens
ggtatggggtagctgccac

SEQ ID NO: 10544 - DNA, 19 bp, Homo sapiens
gggtatggggtagctgcca

SEQ ID NO: 10545 - DNA, 19 bp, Homo sapiens
agggtatggggtagctgcc

SEQ ID NO: 10546 - DNA, 19 bp, Homo sapiens
tagggtatggggtagctgc

SEQ ID NO: 10547 - DNA, 19 bp, Homo sapiens
gtagggtatggggtagctg

SEQ ID NO: 10548 - DNA, 19 bp, Homo sapiens
ggtagggtatggggtagct

SEQ ID NO: 10549 - DNA, 19 bp, Homo sapiens
aggtagggtatggggtagc

SEQ ID NO: 10550 - DNA, 19 bp, Homo sapiens
caggtagggtatggggtag

SEQ ID NO: 10551 - DNA, 19 bp, Homo sapiens
ccaggtagggtatggggta

SEQ ID NO: 10552 - DNA, 19 bp, Homo sapiens
cccaggtagggtatggggt

SEQ ID NO: 10553 - DNA, 19 bp, Homo sapiens
gcccaggtagggtatgggg

SEQ ID NO: 10554 - DNA, 19 bp, Homo sapiens
agcccaggtagggtatggg

SEQ ID NO: 10555 - DNA, 19 bp, Homo sapiens
gagcccaggtagggtatgg

SEQ ID NO: 10556 - DNA, 19 bp, Homo sapiens
ggagcccaggtagggtatg

SEQ ID NO: 10557 - DNA, 19 bp, Homo sapiens
aggagcccaggtagggtat

SEQ ID NO: 10558 - DNA, 19 bp, Homo sapiens
gaggagcccaggtagggta

SEQ ID NO: 10559 - DNA, 19 bp, Homo sapiens
tgaggagcccaggtagggt

SEQ ID NO: 10560 - DNA, 19 bp, Homo sapiens
gtgaggagcccaggtaggg

SEQ ID NO: 10561 - DNA, 19 bp, Homo sapiens
tgtgaggagcccaggtagg

SEQ ID NO: 10562 - DNA, 19 bp, Homo sapiens
gtgtgaggagcccaggtag

SEQ ID NO: 10563 - DNA, 19 bp, Homo sapiens
agtgtgaggagcccaggta

SEQ ID NO: 10564 - DNA, 19 bp, Homo sapiens
tagtgtgaggagcccaggt

SEQ ID NO: 10565 - DNA, 19 bp, Homo sapiens
atagtgtgaggagcccagg

SEQ ID NO: 10566 - DNA, 19 bp, Homo sapiens
gatagtgtgaggagcccag

SEQ ID NO: 10567 - DNA, 19 bp, Homo sapiens
tgatagtgtgaggagccca

SEQ ID NO: 10568 - DNA, 19 bp, Homo sapiens
ctgatagtgtgaggagccc

SEQ ID NO: 10569 - DNA, 19 bp, Homo sapiens
actgatagtgtgaggagcc

SEQ ID NO: 10570 - DNA, 19 bp, Homo sapiens
tactgatagtgtgaggagc

SEQ ID NO: 10571 - DNA, 19 bp, Homo sapiens
gtactgatagtgtgaggag

SEQ ID NO: 10572 - DNA, 19 bp, Homo sapiens
ggtactgatagtgtgagga

SEQ ID NO: 10573 - DNA, 19 bp, Homo sapiens
tggtactgatagtgtgagg

SEQ ID NO: 10574 - DNA, 19 bp, Homo sapiens
ctggtactgatagtgtgag

SEQ ID NO: 10575 - DNA, 19 bp, Homo sapiens
gctggtactgatagtgtga

SEQ ID NO: 10576 - DNA, 19 bp, Homo sapiens
cgctggtactgatagtgtg

SEQ ID NO: 10577 - DNA, 19 bp, Homo sapiens
tcgctggtactgatagtgt

SEQ ID NO: 10578 - DNA, 19 bp, Homo sapiens
ttcgctggtactgatagtg

SEQ ID NO: 10579 - DNA, 19 bp, Homo sapiens
attcgctggtactgatagt

SEQ ID NO: 10580 - DNA, 19 bp, Homo sapiens
cattcgctggtactgatag

SEQ ID NO: 10581 - DNA, 19 bp, Homo sapiens
ccattcgctggtactgata

SEQ ID NO: 10582 - DNA, 19 bp, Homo sapiens
gccattcgctggtactgat

SEQ ID NO: 10583 - DNA, 19 bp, Homo sapiens
tgccattcgctggtactga

SEQ ID NO: 10584 - DNA, 19 bp, Homo sapiens
gtgccattcgctggtactg

SEQ ID NO: 10585 - DNA, 19 bp, Homo sapiens
ggtgccattcgctggtact

SEQ ID NO: 10586 - DNA, 19 bp, Homo sapiens
gggtgccattcgctggtac

SEQ ID NO: 10587 - DNA, 19 bp, Homo sapiens
ggggtgccattcgctggta

SEQ ID NO: 10588 - DNA, 19 bp, Homo sapiens
tggggtgccattcgctggt

SEQ ID NO: 10589 - DNA, 19 bp, Homo sapiens
ctggggtgccattcgctgg

SEQ ID NO: 10590 - DNA, 19 bp, Homo sapiens
cctggggtgccattcgctg

SEQ ID NO: 10591 - DNA, 19 bp, Homo sapiens
gcctggggtgccattcgct

SEQ ID NO: 10592 - DNA, 19 bp, Homo sapiens
ggcctggggtgccattcgc

SEQ ID NO: 10593 - DNA, 19 bp, Homo sapiens
tggcctggggtgccattcg

SEQ ID NO: 10594 - DNA, 19 bp, Homo sapiens
ctggcctggggtgccattc

SEQ ID NO: 10595 - DNA, 19 bp, Homo sapiens
gctggcctggggtgccatt

SEQ ID NO: 10596 - DNA, 19 bp, Homo sapiens
tgctggcctggggtgccat

SEQ ID NO: 10597 - DNA, 19 bp, Homo sapiens
gtgctggcctggggtgcca

SEQ ID NO: 10598 - DNA, 19 bp, Homo sapiens
ggtgctggcctggggtgcc

SEQ ID NO: 10599 - DNA, 19 bp, Homo sapiens
cggtgctggcctggggtgc

SEQ ID NO: 10600 - DNA, 19 bp, Homo sapiens
tcggtgctggcctggggtg

SEQ ID NO: 10601 - DNA, 19 bp, Homo sapiens
atcggtgctggcctggggt

SEQ ID NO: 10602 - DNA, 19 bp, Homo sapiens
catcggtgctggcctgggg

SEQ ID NO: 10603 - DNA, 19 bp, Homo sapiens
ccatcggtgctggcctggg

SEQ ID NO: 10604 - DNA, 19 bp, Homo sapiens
cccatcggtgctggcctgg

SEQ ID NO: 10605 - DNA, 19 bp, Homo sapiens
gcccatcggtgctggcctg

SEQ ID NO: 10606 - DNA, 19 bp, Homo sapiens
tgcccatcggtgctggcct

SEQ ID NO: 10607 - DNA, 19 bp, Homo sapiens
gtgcccatcggtgctggcc

SEQ ID NO: 10608 - DNA, 19 bp, Homo sapiens
ggtgcccatcggtgctggc

SEQ ID NO: 10609 - DNA, 19 bp, Homo sapiens
tggtgcccatcggtgctgg

SEQ ID NO: 10610 - DNA, 19 bp, Homo sapiens
ctggtgcccatcggtgctg

SEQ ID NO: 10611 - DNA, 19 bp, Homo sapiens
gctggtgcccatcggtgct

SEQ ID NO: 10612 - DNA, 19 bp, Homo sapiens
ggctggtgcccatcggtgc

SEQ ID NO: 10613 - DNA, 19 bp, Homo sapiens
aggctggtgcccatcggtg

SEQ ID NO: 10614 - DNA, 19 bp, Homo sapiens
gaggctggtgcccatcggt

SEQ ID NO: 10615 - DNA, 19 bp, Homo sapiens
agaggctggtgcccatcgg

SEQ ID NO: 10616 - DNA, 19 bp, Homo sapiens
gagaggctggtgcccatcg

SEQ ID NO: 10617 - DNA, 19 bp, Homo sapiens
agagaggctggtgcccatc

SEQ ID NO: 10618 - DNA, 19 bp, Homo sapiens
aagagaggctggtgcccat

SEQ ID NO: 10619 - DNA, 19 bp, Homo sapiens
gaagagaggctggtgccca

SEQ ID NO: 10620 - DNA, 19 bp, Homo sapiens
ggaagagaggctggtgccc

SEQ ID NO: 10621 - DNA, 19 bp, Homo sapiens
gggaagagaggctggtgcc

SEQ ID NO: 10622 - DNA, 19 bp, Homo sapiens
tgggaagagaggctggtgc

SEQ ID NO: 10623 - DNA, 19 bp, Homo sapiens
ttgggaagagaggctggtg

SEQ ID NO: 10624 - DNA, 19 bp, Homo sapiens
tttgggaagagaggctggt

SEQ ID NO: 10625 - DNA, 19 bp, Homo sapiens
ttttgggaagagaggctgg

SEQ ID NO: 10626 - DNA, 19 bp, Homo sapiens
gttttgggaagagaggctg

SEQ ID NO: 10627 - DNA, 19 bp, Homo sapiens
ggttttgggaagagaggct

SEQ ID NO: 10628 - DNA, 19 bp, Homo sapiens
gggttttgggaagagaggc

SEQ ID NO: 10629 - DNA, 19 bp, Homo sapiens
tgggttttgggaagagagg

SEQ ID NO: 10630 - DNA, 19 bp, Homo sapiens
atgggttttgggaagagag

SEQ ID NO: 10631 - DNA, 19 bp, Homo sapiens
gatgggttttgggaagaga

SEQ ID NO: 10632 - DNA, 19 bp, Homo sapiens
agatgggttttgggaagag

SEQ ID NO: 10633 - DNA, 19 bp, Homo sapiens
tagatgggttttgggaaga

SEQ ID NO: 10634 - DNA, 19 bp, Homo sapiens
atagatgggttttgggaag

SEQ ID NO: 10635 - DNA, 19 bp, Homo sapiens
aatagatgggttttgggaa

SEQ ID NO: 10636 - DNA, 19 bp, Homo sapiens
gaatagatgggttttggga

SEQ ID NO: 10637 - DNA, 19 bp, Homo sapiens
ggaatagatgggttttggg

SEQ ID NO: 10638 - DNA, 19 bp, Homo sapiens
aggaatagatgggttttgg

SEQ ID NO: 10639 - DNA, 19 bp, Homo sapiens
taggaatagatgggttttg

SEQ ID NO: 10640 - DNA, 19 bp, Homo sapiens
gtaggaatagatgggtttt

SEQ ID NO: 10641 - DNA, 19 bp, Homo sapiens
tgtaggaatagatgggttt

SEQ ID NO: 10642 - DNA, 19 bp, Homo sapiens
ctgtaggaatagatgggtt

SEQ ID NO: 10643 - DNA, 19 bp, Homo sapiens
gctgtaggaatagatgggt

SEQ ID NO: 10644 - DNA, 19 bp, Homo sapiens
tgctgtaggaatagatggg

SEQ ID NO: 10645 - DNA, 19 bp, Homo sapiens
atgctgtaggaatagatgg

SEQ ID NO: 10646 - DNA, 19 bp, Homo sapiens
gatgctgtaggaatagatg

SEQ ID NO: 10647 - DNA, 19 bp, Homo sapiens
ggatgctgtaggaatagat

SEQ ID NO: 10648 - DNA, 19 bp, Homo sapiens
aggatgctgtaggaataga

SEQ ID NO: 10649 - DNA, 19 bp, Homo sapiens
gaggatgctgtaggaatag

SEQ ID NO: 10650 - DNA, 19 bp, Homo sapiens
tgaggatgctgtaggaata

SEQ ID NO: 10651 - DNA, 19 bp, Homo sapiens
atgaggatgctgtaggaat

SEQ ID NO: 10652 - DNA, 19 bp, Homo sapiens
gatgaggatgctgtaggaa

SEQ ID NO: 10653 - DNA, 19 bp, Homo sapiens
agatgaggatgctgtagga

SEQ ID NO: 10654 - DNA, 19 bp, Homo sapiens
aagatgaggatgctgtagg

SEQ ID NO: 10655 - DNA, 19 bp, Homo sapiens
gaagatgaggatgctgtag

SEQ ID NO: 10656 - DNA, 19 bp, Homo sapiens
tgaagatgaggatgctgta

SEQ ID NO: 10657 - DNA, 19 bp, Homo sapiens
atgaagatgaggatgctgt

SEQ ID NO: 10658 - DNA, 19 bp, Homo sapiens
catgaagatgaggatgctg

SEQ ID NO: 10659 - DNA, 19 bp, Homo sapiens
ccatgaagatgaggatgct

SEQ ID NO: 10660 - DNA, 19 bp, Homo sapiens
gccatgaagatgaggatgc

SEQ ID NO: 10661 - DNA, 19 bp, Homo sapiens
ggccatgaagatgaggatg

SEQ ID NO: 10662 - DNA, 19 bp, Homo sapiens
gggccatgaagatgaggat

SEQ ID NO: 10663 - DNA, 19 bp, Homo sapiens
agggccatgaagatgagga

SEQ ID NO: 10664 - DNA, 19 bp, Homo sapiens
aagggccatgaagatgagg

SEQ ID NO: 10665 - DNA, 19 bp, Homo sapiens
taagggccatgaagatgag

SEQ ID NO: 10666 - DNA, 19 bp, Homo sapiens
ttaagggccatgaagatga

SEQ ID NO: 10667 - DNA, 19 bp, Homo sapiens
cttaagggccatgaagatg

SEQ ID NO: 10668 - DNA, 19 bp, Homo sapiens
tcttaagggccatgaagat

SEQ ID NO: 10669 - DNA, 19 bp, Homo sapiens
ttcttaagggccatgaaga

SEQ ID NO: 10670 - DNA, 19 bp, Homo sapiens
gttcttaagggccatgaag

SEQ ID NO: 10671 - DNA, 19 bp, Homo sapiens
tgttcttaagggccatgaa

SEQ ID NO: 10672 - DNA, 19 bp, Homo sapiens
ctgttcttaagggccatga

SEQ ID NO: 10673 - DNA, 19 bp, Homo sapiens
actgttcttaagggccatg

SEQ ID NO: 10674 - DNA, 19 bp, Homo sapiens
tactgttcttaagggccat

SEQ ID NO: 10675 - DNA, 19 bp, Homo sapiens
ttactgttcttaagggcca

SEQ ID NO: 10676 - DNA, 19 bp, Homo sapiens
tttactgttcttaagggcc

SEQ ID NO: 10677 - DNA, 19 bp, Homo sapiens
ttttactgttcttaagggc

SEQ ID NO: 10678 - DNA, 19 bp, Homo sapiens
gttttactgttcttaaggg

SEQ ID NO: 10679 - DNA, 19 bp, Homo sapiens
agttttactgttcttaagg

SEQ ID NO: 10680 - DNA, 19 bp, Homo sapiens
cagttttactgttcttaag

SEQ ID NO: 10681 - DNA, 19 bp, Homo sapiens
ccagttttactgttcttaa

SEQ ID NO: 10682 - DNA, 19 bp, Homo sapiens
cccagttttactgttctta

SEQ ID NO: 10683 - DNA, 19 bp, Homo sapiens
tcccagttttactgttctt

SEQ ID NO: 10684 - DNA, 19 bp, Homo sapiens
ctcccagttttactgttct

SEQ ID NO: 10685 - DNA, 19 bp, Homo sapiens
gctcccagttttactgttc

SEQ ID NO: 10686 - DNA, 19 bp, Homo sapiens
ggctcccagttttactgtt

SEQ ID NO: 10687 - DNA, 19 bp, Homo sapiens
aggctcccagttttactgt

SEQ ID NO: 10688 - DNA, 19 bp, Homo sapiens
aaggctcccagttttactg

SEQ ID NO: 10689 - DNA, 19 bp, Homo sapiens
gaaggctcccagttttact

SEQ ID NO: 10690 - DNA, 19 bp, Homo sapiens
ggaaggctcccagttttac

SEQ ID NO: 10691 - DNA, 19 bp, Homo sapiens
gggaaggctcccagtttta

SEQ ID NO: 10692 - DNA, 19 bp, Homo sapiens
cgggaaggctcccagtttt

SEQ ID NO: 10693 - DNA, 19 bp, Homo sapiens
acgggaaggctcccagttt

SEQ ID NO: 10694 - DNA, 19 bp, Homo sapiens
gacgggaaggctcccagtt

SEQ ID NO: 10695 - DNA, 19 bp, Homo sapiens
tgacgggaaggctcccagt

SEQ ID NO: 10696 - DNA, 19 bp, Homo sapiens
ctgacgggaaggctcccag

SEQ ID NO: 10697 - DNA, 19 bp, Homo sapiens
gctgacgggaaggctccca

SEQ ID NO: 10698 - DNA, 19 bp, Homo sapiens
cgctgacgggaaggctccc

SEQ ID NO: 10699 - DNA, 19 bp, Homo sapiens
tcgctgacgggaaggctcc

SEQ ID NO: 10700 - DNA, 19 bp, Homo sapiens
ctcgctgacgggaaggctc

SEQ ID NO: 10701 - DNA, 19 bp, Homo sapiens
tctcgctgacgggaaggct

SEQ ID NO: 10702 - DNA, 19 bp, Homo sapiens
atctcgctgacgggaaggc

SEQ ID NO: 10703 - DNA, 19 bp, Homo sapiens
gatctcgctgacgggaagg

SEQ ID NO: 10704 - DNA, 19 bp, Homo sapiens
agatctcgctgacgggaag

SEQ ID NO: 10705 - DNA, 19 bp, Homo sapiens
tagatctcgctgacgggaa

SEQ ID NO: 10706 - DNA, 19 bp, Homo sapiens
gtagatctcgctgacggga

SEQ ID NO: 10707 - DNA, 19 bp, Homo sapiens
tgtagatctcgctgacggg

SEQ ID NO: 10708 - DNA, 19 bp, Homo sapiens
ttgtagatctcgctgacgg

SEQ ID NO: 10709 - DNA, 19 bp, Homo sapiens
attgtagatctcgctgacg

SEQ ID NO: 10710 - DNA, 19 bp, Homo sapiens
aattgtagatctcgctgac

SEQ ID NO: 10711 - DNA, 19 bp, Homo sapiens
aaattgtagatctcgctga

SEQ ID NO: 10712 - DNA, 19 bp, Homo sapiens
aaaattgtagatctcgctg

SEQ ID NO: 10713 - DNA, 19 bp, Homo sapiens
taaaattgtagatctcgct

SEQ ID NO: 10714 - DNA, 19 bp, Homo sapiens
ataaaattgtagatctcgc

SEQ ID NO: 10715 - DNA, 19 bp, Homo sapiens
cataaaattgtagatctcg

SEQ ID NO: 10716 - DNA, 19 bp, Homo sapiens
tcataaaattgtagatctc

SEQ ID NO: 10717 - DNA, 19 bp, Homo sapiens
gtcataaaattgtagatct

SEQ ID NO: 10718 - DNA, 19 bp, Homo sapiens
cgtcataaaattgtagatc

SEQ ID NO: 10719 - DNA, 19 bp, Homo sapiens
ccgtcataaaattgtagat

SEQ ID NO: 10720 - DNA, 19 bp, Homo sapiens
tccgtcataaaattgtaga

SEQ ID NO: 10721 - DNA, 19 bp, Homo sapiens
ctccgtcataaaattgtag

SEQ ID NO: 10722 - DNA, 19 bp, Homo sapiens
gctccgtcataaaattgta

SEQ ID NO: 10723 - DNA, 19 bp, Homo sapiens
tgctccgtcataaaattgt

SEQ ID NO: 10724 - DNA, 19 bp, Homo sapiens
gtgctccgtcataaaattg

SEQ ID NO: 10725 - DNA, 19 bp, Homo sapiens
agtgctccgtcataaaatt

SEQ ID NO: 10726 - DNA, 19 bp, Homo sapiens
aagtgctccgtcataaaat

SEQ ID NO: 10727 - DNA, 19 bp, Homo sapiens
aaagtgctccgtcataaaa

SEQ ID NO: 10728 - DNA, 19 bp, Homo sapiens
gaaagtgctccgtcataaa

SEQ ID NO: 10729 - DNA, 19 bp, Homo sapiens
ggaaagtgctccgtcataa

SEQ ID NO: 10730 - DNA, 19 bp, Homo sapiens
aggaaagtgctccgtcata

SEQ ID NO: 10731 - DNA, 19 bp, Homo sapiens
aaggaaagtgctccgtcat

SEQ ID NO: 10732 - DNA, 19 bp, Homo sapiens
taaggaaagtgctccgtca

SEQ ID NO: 10733 - DNA, 19 bp, Homo sapiens
gtaaggaaagtgctccgtc

SEQ ID NO: 10734 - DNA, 19 bp, Homo sapiens
agtaaggaaagtgctccgt

SEQ ID NO: 10735 - DNA, 19 bp, Homo sapiens
aagtaaggaaagtgctccg

SEQ ID NO: 10736 - DNA, 19 bp, Homo sapiens
gaagtaaggaaagtgctcc

SEQ ID NO: 10737 - DNA, 19 bp, Homo sapiens
tgaagtaaggaaagtgctc

SEQ ID NO: 10738 - DNA, 19 bp, Homo sapiens
ttgaagtaaggaaagtgct

SEQ ID NO: 10739 - DNA, 19 bp, Homo sapiens
cttgaagtaaggaaagtgc

SEQ ID NO: 10740 - DNA, 19 bp, Homo sapiens
tcttgaagtaaggaaagtg

SEQ ID NO: 10741 - DNA, 19 bp, Homo sapiens
gtcttgaagtaaggaaagt

SEQ ID NO: 10742 - DNA, 19 bp, Homo sapiens
tgtcttgaagtaaggaaag

SEQ ID NO: 10743 - DNA, 19 bp, Homo sapiens
ctgtcttgaagtaaggaaa

SEQ ID NO: 10744 - DNA, 19 bp, Homo sapiens
gctgtcttgaagtaaggaa

SEQ ID NO: 10745 - DNA, 19 bp, Homo sapiens
tgctgtcttgaagtaagga

SEQ ID NO: 10746 - DNA, 19 bp, Homo sapiens
gtgctgtcttgaagtaagg

SEQ ID NO: 10747 - DNA, 19 bp, Homo sapiens
ggtgctgtcttgaagtaag

SEQ ID NO: 10748 - DNA, 19 bp, Homo sapiens
gggtgctgtcttgaagtaa

SEQ ID NO: 10749 - DNA, 19 bp, Homo sapiens
cgggtgctgtcttgaagta

SEQ ID NO: 10750 - DNA, 19 bp, Homo sapiens
tcgggtgctgtcttgaagt

SEQ ID NO: 10751 - DNA, 19 bp, Homo sapiens
atcgggtgctgtcttgaag

SEQ ID NO: 10752 - DNA, 19 bp, Homo sapiens
catcgggtgctgtcttgaa

SEQ ID NO: 10753 - DNA, 19 bp, Homo sapiens
ccatcgggtgctgtcttga

SEQ ID NO: 10754 - DNA, 19 bp, Homo sapiens
gccatcgggtgctgtcttg

SEQ ID NO: 10755 - DNA, 19 bp, Homo sapiens
agccatcgggtgctgtctt

SEQ ID NO: 10756 - DNA, 19 bp, Homo sapiens
cagccatcgggtgctgtct

SEQ ID NO: 10757 - DNA, 19 bp, Homo sapiens
ccagccatcgggtgctgtc

SEQ ID NO: 10758 - DNA, 19 bp, Homo sapiens
tccagccatcgggtgctgt

SEQ ID NO: 10759 - DNA, 19 bp, Homo sapiens
ttccagccatcgggtgctg

SEQ ID NO: 10760 - DNA, 19 bp, Homo sapiens
cttccagccatcgggtgct

SEQ ID NO: 10761 - DNA, 19 bp, Homo sapiens
tcttccagccatcgggtgc

SEQ ID NO: 10762 - DNA, 19 bp, Homo sapiens
ttcttccagccatcgggtg

SEQ ID NO: 10763 - DNA, 19 bp, Homo sapiens
attcttccagccatcgggt

SEQ ID NO: 10764 - DNA, 19 bp, Homo sapiens
aattcttccagccatcggg

SEQ ID NO: 10765 - DNA, 19 bp, Homo sapiens
gaattcttccagccatcgg

SEQ ID NO: 10766 - DNA, 19 bp, Homo sapiens
agaattcttccagccatcg

SEQ ID NO: 10767 - DNA, 19 bp, Homo sapiens
cagaattcttccagccatc

SEQ ID NO: 10768 - DNA, 19 bp, Homo sapiens
acagaattcttccagccat

SEQ ID NO: 10769 - DNA, 19 bp, Homo sapiens
gacagaattcttccagcca

SEQ ID NO: 10770 - DNA, 19 bp, Homo sapiens
ggacagaattcttccagcc

SEQ ID NO: 10771 - DNA, 19 bp, Homo sapiens
cggacagaattcttccagc

SEQ ID NO: 10772 - DNA, 19 bp, Homo sapiens
ccggacagaattcttccag

SEQ ID NO: 10773 - DNA, 19 bp, Homo sapiens
gccggacagaattcttcca

SEQ ID NO: 10774 - DNA, 19 bp, Homo sapiens
tgccggacagaattcttcc

SEQ ID NO: 10775 - DNA, 19 bp, Homo sapiens
gtgccggacagaattcttc

SEQ ID NO: 10776 - DNA, 19 bp, Homo sapiens
tgtgccggacagaattctt

SEQ ID NO: 10777 - DNA, 19 bp, Homo sapiens
ttgtgccggacagaattct

SEQ ID NO: 10778 - DNA, 19 bp, Homo sapiens
gttgtgccggacagaattc

SEQ ID NO: 10779 - DNA, 19 bp, Homo sapiens
ggttgtgccggacagaatt

SEQ ID NO: 10780 - DNA, 19 bp, Homo sapiens
aggttgtgccggacagaat

SEQ ID NO: 10781 - DNA, 19 bp, Homo sapiens
taggttgtgccggacagaa

SEQ ID NO: 10782 - DNA, 19 bp, Homo sapiens
ataggttgtgccggacaga

SEQ ID NO: 10783 - DNA, 19 bp, Homo sapiens
gataggttgtgccggacag

SEQ ID NO: 10784 - DNA, 19 bp, Homo sapiens
ggataggttgtgccggaca

SEQ ID NO: 10785 - DNA, 19 bp, Homo sapiens
gggataggttgtgccggac

SEQ ID NO: 10786 - DNA, 19 bp, Homo sapiens
agggataggttgtgccgga

SEQ ID NO: 10787 - DNA, 19 bp, Homo sapiens
gagggataggttgtgccgg

SEQ ID NO: 10788 - DNA, 19 bp, Homo sapiens
tgagggataggttgtgccg

SEQ ID NO: 10789 - DNA, 19 bp, Homo sapiens
ttgagggataggttgtgcc

SEQ ID NO: 10790 - DNA, 19 bp, Homo sapiens
gttgagggataggttgtgc

SEQ ID NO: 10791 - DNA, 19 bp, Homo sapiens
tgttgagggataggttgtg

SEQ ID NO: 10792 - DNA, 19 bp, Homo sapiens
ttgttgagggataggttgt

SEQ ID NO: 10793 - DNA, 19 bp, Homo sapiens
cttgttgagggataggttg

SEQ ID NO: 10794 - DNA, 19 bp, Homo sapiens
acttgttgagggataggtt

SEQ ID NO: 10795 - DNA, 19 bp, Homo sapiens
cacttgttgagggataggt

SEQ ID NO: 10796 - DNA, 19 bp, Homo sapiens
gcacttgttgagggatagg

SEQ ID NO: 10797 - DNA, 19 bp, Homo sapiens
agcacttgttgagggatag

SEQ ID NO: 10798 - DNA, 19 bp, Homo sapiens
aagcacttgttgagggata

SEQ ID NO: 10799 - DNA, 19 bp, Homo sapiens
gaagcacttgttgagggat

SEQ ID NO: 10800 - DNA, 19 bp, Homo sapiens
cgaagcacttgttgaggga

SEQ ID NO: 10801 - DNA, 19 bp, Homo sapiens
tcgaagcacttgttgaggg

SEQ ID NO: 10802 - DNA, 19 bp, Homo sapiens
ctcgaagcacttgttgagg

SEQ ID NO: 10803 - DNA, 19 bp, Homo sapiens
tctcgaagcacttgttgag

SEQ ID NO: 10804 - DNA, 19 bp, Homo sapiens
ttctcgaagcacttgttga

SEQ ID NO: 10805 - DNA, 19 bp, Homo sapiens
cttctcgaagcacttgttg

SEQ ID NO: 10806 - DNA, 19 bp, Homo sapiens
ccttctcgaagcacttgtt

SEQ ID NO: 10807 - DNA, 19 bp, Homo sapiens
accttctcgaagcacttgt

SEQ ID NO: 10808 - DNA, 19 bp, Homo sapiens
caccttctcgaagcacttg

SEQ ID NO: 10809 - DNA, 19 bp, Homo sapiens
ccaccttctcgaagcactt

SEQ ID NO: 10810 - DNA, 19 bp, Homo sapiens
tccaccttctcgaagcact

SEQ ID NO: 10811 - DNA, 19 bp, Homo sapiens
ctccaccttctcgaagcac

SEQ ID NO: 10812 - DNA, 19 bp, Homo sapiens
tctccaccttctcgaagca

SEQ ID NO: 10813 - DNA, 19 bp, Homo sapiens
ttctccaccttctcgaagc

SEQ ID NO: 10814 - DNA, 19 bp, Homo sapiens
gttctccaccttctcgaag

SEQ ID NO: 10815 - DNA, 19 bp, Homo sapiens
tgttctccaccttctcgaa

SEQ ID NO: 10816 - DNA, 19 bp, Homo sapiens
ttgttctccaccttctcga

SEQ ID NO: 10817 - DNA, 19 bp, Homo sapiens
tttgttctccaccttctcg

SEQ ID NO: 10818 - DNA, 19 bp, Homo sapiens
atttgttctccaccttctc

SEQ ID NO: 10819 - DNA, 19 bp, Homo sapiens
gatttgttctccaccttct

SEQ ID NO: 10820 - DNA, 19 bp, Homo sapiens
tgatttgttctccaccttc

SEQ ID NO: 10821 - DNA, 19 bp, Homo sapiens
ctgatttgttctccacctt

SEQ ID NO: 10822 - DNA, 19 bp, Homo sapiens
cctgatttgttctccacct

SEQ ID NO: 10823 - DNA, 19 bp, Homo sapiens
tcctgatttgttctccacc

SEQ ID NO: 10824 - DNA, 19 bp, Homo sapiens
ttcctgatttgttctccac

SEQ ID NO: 10825 - DNA, 19 bp, Homo sapiens
cttcctgatttgttctcca

SEQ ID NO: 10826 - DNA, 19 bp, Homo sapiens
acttcctgatttgttctcc

SEQ ID NO: 10827 - DNA, 19 bp, Homo sapiens
aacttcctgatttgttctc

SEQ ID NO: 10828 - DNA, 19 bp, Homo sapiens
gaacttcctgatttgttct

SEQ ID NO: 10829 - DNA, 19 bp, Homo sapiens
ggaacttcctgatttgttc

SEQ ID NO: 10830 - DNA, 19 bp, Homo sapiens
aggaacttcctgatttgtt

SEQ ID NO: 10831 - DNA, 19 bp, Homo sapiens
gaggaacttcctgatttgt

SEQ ID NO: 10832 - DNA, 19 bp, Homo sapiens
ggaggaacttcctgatttg

SEQ ID NO: 10833 - DNA, 19 bp, Homo sapiens
gggaggaacttcctgattt

SEQ ID NO: 10834 - DNA, 19 bp, Homo sapiens
cgggaggaacttcctgatt

SEQ ID NO: 10835 - DNA, 19 bp, Homo sapiens
gcgggaggaacttcctgat

SEQ ID NO: 10836 - DNA, 19 bp, Homo sapiens
tgcgggaggaacttcctga

SEQ ID NO: 10837 - DNA, 19 bp, Homo sapiens
ttgcgggaggaacttcctg

SEQ ID NO: 10838 - DNA, 19 bp, Homo sapiens
cttgcgggaggaacttcct

SEQ ID NO: 10839 - DNA, 19 bp, Homo sapiens
ccttgcgggaggaacttcc

SEQ ID NO: 10840 - DNA, 19 bp, Homo sapiens
cccttgcgggaggaacttc

SEQ ID NO: 10841 - DNA, 19 bp, Homo sapiens
gcccttgcgggaggaactt

SEQ ID NO: 10842 - DNA, 19 bp, Homo sapiens
agcccttgcgggaggaact

SEQ ID NO: 10843 - DNA, 19 bp, Homo sapiens
cagcccttgcgggaggaac

SEQ ID NO: 10844 - DNA, 19 bp, Homo sapiens
gcagcccttgcgggaggaa

SEQ ID NO: 10845 - DNA, 19 bp, Homo sapiens
ggcagcccttgcgggagga

SEQ ID NO: 10846 - DNA, 19 bp, Homo sapiens
aggcagcccttgcgggagg

SEQ ID NO: 10847 - DNA, 19 bp, Homo sapiens
caggcagcccttgcgggag

SEQ ID NO: 10848 - DNA, 19 bp, Homo sapiens
acaggcagcccttgcggga

SEQ ID NO: 10849 - DNA, 19 bp, Homo sapiens
cacaggcagcccttgcggg

SEQ ID NO: 10850 - DNA, 19 bp, Homo sapiens
ccacaggcagcccttgcgg

SEQ ID NO: 10851 - DNA, 19 bp, Homo sapiens
cccacaggcagcccttgcg

SEQ ID NO: 10852 - DNA, 19 bp, Homo sapiens
gcccacaggcagcccttgc

SEQ ID NO: 10853 - DNA, 19 bp, Homo sapiens
ggcccacaggcagcccttg

SEQ ID NO: 10854 - DNA, 19 bp, Homo sapiens
gggcccacaggcagccctt

SEQ ID NO: 10855 - DNA, 19 bp, Homo sapiens
agggcccacaggcagccct

SEQ ID NO: 10856 - DNA, 19 bp, Homo sapiens
gagggcccacaggcagccc

SEQ ID NO: 10857 - DNA, 19 bp, Homo sapiens
tgagggcccacaggcagcc

SEQ ID NO: 10858 - DNA, 19 bp, Homo sapiens
ttgagggcccacaggcagc

SEQ ID NO: 10859 - DNA, 19 bp, Homo sapiens
attgagggcccacaggcag

SEQ ID NO: 10860 - DNA, 19 bp, Homo sapiens
gattgagggcccacaggca

SEQ ID NO: 10861 - DNA, 19 bp, Homo sapiens
ggattgagggcccacaggc

SEQ ID NO: 10862 - DNA, 19 bp, Homo sapiens
cggattgagggcccacagg

SEQ ID NO: 10863 - DNA, 19 bp, Homo sapiens
ccggattgagggcccacag

SEQ ID NO: 10864 - DNA, 19 bp, Homo sapiens
gccggattgagggcccaca

SEQ ID NO: 10865 - DNA, 19 bp, Homo sapiens
ggccggattgagggcccac

SEQ ID NO: 10866 - DNA, 19 bp, Homo sapiens
tggccggattgagggccca

SEQ ID NO: 10867 - DNA, 19 bp, Homo sapiens
ttggccggattgagggccc

SEQ ID NO: 10868 - DNA, 19 bp, Homo sapiens
cttggccggattgagggcc

SEQ ID NO: 10869 - DNA, 19 bp, Homo sapiens
tcttggccggattgagggc

SEQ ID NO: 10870 - DNA, 19 bp, Homo sapiens
atcttggccggattgaggg

SEQ ID NO: 10871 - DNA, 19 bp, Homo sapiens
gatcttggccggattgagg

SEQ ID NO: 10872 - DNA, 19 bp, Homo sapiens
cgatcttggccggattgag

SEQ ID NO: 10873 - DNA, 19 bp, Homo sapiens
tcgatcttggccggattga

SEQ ID NO: 10874 - DNA, 19 bp, Homo sapiens
gtcgatcttggccggattg

SEQ ID NO: 10875 - DNA, 19 bp, Homo sapiens
tgtcgatcttggccggatt

SEQ ID NO: 10876 - DNA, 19 bp, Homo sapiens
ttgtcgatcttggccggat

SEQ ID NO: 10877 - DNA, 19 bp, Homo sapiens
cttgtcgatcttggccgga

SEQ ID NO: 10878 - DNA, 19 bp, Homo sapiens
tcttgtcgatcttggccgg

SEQ ID NO: 10879 - DNA, 19 bp, Homo sapiens
atcttgtcgatcttggccg

SEQ ID NO: 10880 - DNA, 19 bp, Homo sapiens
catcttgtcgatcttggcc

SEQ ID NO: 10881 - DNA, 19 bp, Homo sapiens
gcatcttgtcgatcttggc

SEQ ID NO: 10882 - DNA, 19 bp, Homo sapiens
tgcatcttgtcgatcttgg

SEQ ID NO: 10883 - DNA, 19 bp, Homo sapiens
ttgcatcttgtcgatcttg

SEQ ID NO: 10884 - DNA, 19 bp, Homo sapiens
cttgcatcttgtcgatctt

SEQ ID NO: 10885 - DNA, 19 bp, Homo sapiens
tcttgcatcttgtcgatct

SEQ ID NO: 10886 - DNA, 19 bp, Homo sapiens
ctcttgcatcttgtcgatc

SEQ ID NO: 10887 - DNA, 19 bp, Homo sapiens
cctcttgcatcttgtcgat

SEQ ID NO: 10888 - DNA, 19 bp, Homo sapiens
tcctcttgcatcttgtcga

SEQ ID NO: 10889 - DNA, 19 bp, Homo sapiens
ctcctcttgcatcttgtcg

SEQ ID NO: 10890 - DNA, 19 bp, Homo sapiens
gctcctcttgcatcttgtc

SEQ ID NO: 10891 - DNA, 19 bp, Homo sapiens
agctcctcttgcatcttgt

SEQ ID NO: 10892 - DNA, 19 bp, Homo sapiens
cagctcctcttgcatcttg

SEQ ID NO: 10893 - DNA, 19 bp, Homo sapiens
gcagctcctcttgcatctt

SEQ ID NO: 10894 - DNA, 19 bp, Homo sapiens
tgcagctcctcttgcatct

SEQ ID NO: 10895 - DNA, 19 bp, Homo sapiens
ttgcagctcctcttgcatc

SEQ ID NO: 10896 - DNA, 19 bp, Homo sapiens
tttgcagctcctcttgcat

SEQ ID NO: 10897 - DNA, 19 bp, Homo sapiens
ttttgcagctcctcttgca

SEQ ID NO: 10898 - DNA, 19 bp, Homo sapiens
tttttgcagctcctcttgc

SEQ ID NO: 10899 - DNA, 19 bp, Homo sapiens
atttttgcagctcctcttg

SEQ ID NO: 10900 - DNA, 19 bp, Homo sapiens
catttttgcagctcctctt

SEQ ID NO: 10901 - DNA, 19 bp, Homo sapiens
ccatttttgcagctcctct

SEQ ID NO: 10902 - DNA, 19 bp, Homo sapiens
tccatttttgcagctcctc

SEQ ID NO: 10903 - DNA, 19 bp, Homo sapiens
ttccatttttgcagctcct

SEQ ID NO: 10904 - DNA, 19 bp, Homo sapiens
cttccatttttgcagctcc

SEQ ID NO: 10905 - DNA, 19 bp, Homo sapiens
tcttccatttttgcagctc

SEQ ID NO: 10906 - DNA, 19 bp, Homo sapiens
ctcttccatttttgcagct

SEQ ID NO: 10907 - DNA, 19 bp, Homo sapiens
cctcttccatttttgcagc

SEQ ID NO: 10908 - DNA, 19 bp, Homo sapiens
tcctcttccatttttgcag

SEQ ID NO: 10909 - DNA, 19 bp, Homo sapiens
ttcctcttccatttttgca

SEQ ID NO: 10910 - DNA, 19 bp, Homo sapiens
tttcctcttccatttttgc

SEQ ID NO: 10911 - DNA, 19 bp, Homo sapiens
ctttcctcttccatttttg

SEQ ID NO: 10912 - DNA, 19 bp, Homo sapiens
tctttcctcttccattttt

SEQ ID NO: 10913 - DNA, 19 bp, Homo sapiens
atctttcctcttccatttt

SEQ ID NO: 10914 - DNA, 19 bp, Homo sapiens
gatctttcctcttccattt

SEQ ID NO: 10915 - DNA, 19 bp, Homo sapiens
ggatctttcctcttccatt

SEQ ID NO: 10916 - DNA, 19 bp, Homo sapiens
gggatctttcctcttccat

SEQ ID NO: 10917 - DNA, 19 bp, Homo sapiens
tgggatctttcctcttcca

SEQ ID NO: 10918 - DNA, 19 bp, Homo sapiens
atgggatctttcctcttcc

SEQ ID NO: 10919 - DNA, 19 bp, Homo sapiens
aatgggatctttcctcttc

SEQ ID NO: 10920 - DNA, 19 bp, Homo sapiens
caatgggatctttcctctt

SEQ ID NO: 10921 - DNA, 19 bp, Homo sapiens
gcaatgggatctttcctct

SEQ ID NO: 10922 - DNA, 19 bp, Homo sapiens
agcaatgggatctttcctc

SEQ ID NO: 10923 - DNA, 19 bp, Homo sapiens
cagcaatgggatctttcct

SEQ ID NO: 10924 - DNA, 19 bp, Homo sapiens
acagcaatgggatctttcc

SEQ ID NO: 10925 - DNA, 19 bp, Homo sapiens
cacagcaatgggatctttc

SEQ ID NO: 10926 - DNA, 19 bp, Homo sapiens
gcacagcaatgggatcttt

SEQ ID NO: 10927 - DNA, 19 bp, Homo sapiens
cgcacagcaatgggatctt

SEQ ID NO: 10928 - DNA, 19 bp, Homo sapiens
gcgcacagcaatgggatct

SEQ ID NO: 10929 - DNA, 19 bp, Homo sapiens
tgcgcacagcaatgggatc

SEQ ID NO: 10930 - DNA, 19 bp, Homo sapiens
ttgcgcacagcaatgggat

SEQ ID NO: 10931 - DNA, 19 bp, Homo sapiens
tttgcgcacagcaatggga

SEQ ID NO: 10932 - DNA, 19 bp, Homo sapiens
ttttgcgcacagcaatggg

SEQ ID NO: 10933 - DNA, 19 bp, Homo sapiens
cttttgcgcacagcaatgg

SEQ ID NO: 10934 - DNA, 19 bp, Homo sapiens
gcttttgcgcacagcaatg

SEQ ID NO: 10935 - DNA, 19 bp, Homo sapiens
tgcttttgcgcacagcaat

SEQ ID NO: 10936 - DNA, 19 bp, Homo sapiens
atgcttttgcgcacagcaa

SEQ ID NO: 10937 - DNA, 19 bp, Homo sapiens
catgcttttgcgcacagca

SEQ ID NO: 10938 - DNA, 19 bp, Homo sapiens
ccatgcttttgcgcacagc

SEQ ID NO: 10939 - DNA, 19 bp, Homo sapiens
gccatgcttttgcgcacag

SEQ ID NO: 10940 - DNA, 19 bp, Homo sapiens
ggccatgcttttgcgcaca

SEQ ID NO: 10941 - DNA, 19 bp, Homo sapiens
tggccatgcttttgcgcac

SEQ ID NO: 10942 - DNA, 19 bp, Homo sapiens
ttggccatgcttttgcgca

SEQ ID NO: 10943 - DNA, 19 bp, Homo sapiens
cttggccatgcttttgcgc

SEQ ID NO: 10944 - DNA, 19 bp, Homo sapiens
gcttggccatgcttttgcg

SEQ ID NO: 10945 - DNA, 19 bp, Homo sapiens
ggcttggccatgcttttgc

SEQ ID NO: 10946 - DNA, 19 bp, Homo sapiens
tggcttggccatgcttttg

SEQ ID NO: 10947 - DNA, 19 bp, Homo sapiens
ctggcttggccatgctttt

SEQ ID NO: 10948 - DNA, 19 bp, Homo sapiens
tctggcttggccatgcttt

SEQ ID NO: 10949 - DNA, 19 bp, Homo sapiens
ttctggcttggccatgctt

SEQ ID NO: 10950 - DNA, 19 bp, Homo sapiens
cttctggcttggccatgct

SEQ ID NO: 10951 - DNA, 19 bp, Homo sapiens
tcttctggcttggccatgc

SEQ ID NO: 10952 - DNA, 19 bp, Homo sapiens
ctcttctggcttggccatg

SEQ ID NO: 10953 - DNA, 19 bp, Homo sapiens
gctcttctggcttggccat

SEQ ID NO: 10954 - DNA, 19 bp, Homo sapiens
agctcttctggcttggcca

SEQ ID NO: 10955 - DNA, 19 bp, Homo sapiens
cagctcttctggcttggcc

SEQ ID NO: 10956 - DNA, 19 bp, Homo sapiens
ccagctcttctggcttggc

SEQ ID NO: 10957 - DNA, 19 bp, Homo sapiens
tccagctcttctggcttgg

SEQ ID NO: 10958 - DNA, 19 bp, Homo sapiens
gtccagctcttctggcttg

SEQ ID NO: 10959 - DNA, 19 bp, Homo sapiens
tgtccagctcttctggctt

SEQ ID NO: 10960 - DNA, 19 bp, Homo sapiens
ctgtccagctcttctggct

SEQ ID NO: 10961 - DNA, 19 bp, Homo sapiens
gctgtccagctcttctggc

SEQ ID NO: 10962 - DNA, 19 bp, Homo sapiens
ggctgtccagctcttctgg

SEQ ID NO: 10963 - DNA, 19 bp, Homo sapiens
aggctgtccagctcttctg

SEQ ID NO: 10964 - DNA, 19 bp, Homo sapiens
gaggctgtccagctcttct

SEQ ID NO: 10965 - DNA, 19 bp, Homo sapiens
tgaggctgtccagctcttc

SEQ ID NO: 10966 - DNA, 19 bp, Homo sapiens
atgaggctgtccagctctt

SEQ ID NO: 10967 - DNA, 19 bp, Homo sapiens
aatgaggctgtccagctct

SEQ ID NO: 10968 - DNA, 19 bp, Homo sapiens
caatgaggctgtccagctc

SEQ ID NO: 10969 - DNA, 19 bp, Homo sapiens
ccaatgaggctgtccagct

SEQ ID NO: 10970 - DNA, 19 bp, Homo sapiens
tccaatgaggctgtccagc

SEQ ID NO: 10971 - DNA, 19 bp, Homo sapiens
ctccaatgaggctgtccag

SEQ ID NO: 10972 - DNA, 19 bp, Homo sapiens
tctccaatgaggctgtcca

SEQ ID NO: 10973 - DNA, 19 bp, Homo sapiens
gtctccaatgaggctgtcc

SEQ ID NO: 10974 - DNA, 19 bp, Homo sapiens
tgtctccaatgaggctgtc

SEQ ID NO: 10975 - DNA, 19 bp, Homo sapiens
ttgtctccaatgaggctgt

SEQ ID NO: 10976 - DNA, 19 bp, Homo sapiens
cttgtctccaatgaggctg

SEQ ID NO: 10977 - DNA, 19 bp, Homo sapiens
tcttgtctccaatgaggct

SEQ ID NO: 10978 - DNA, 19 bp, Homo sapiens
ctcttgtctccaatgaggc

SEQ ID NO: 10979 - DNA, 19 bp, Homo sapiens
tctcttgtctccaatgagg

SEQ ID NO: 10980 - DNA, 19 bp, Homo sapiens
ctctcttgtctccaatgag

SEQ ID NO: 10981 - DNA, 19 bp, Homo sapiens
tctctcttgtctccaatga

SEQ ID NO: 10982 - DNA, 19 bp, Homo sapiens
ttctctcttgtctccaatg

SEQ ID NO: 10983 - DNA, 19 bp, Homo sapiens
tttctctcttgtctccaat

SEQ ID NO: 10984 - DNA, 19 bp, Homo sapiens
ttttctctcttgtctccaa

SEQ ID NO: 10985 - DNA, 19 bp, Homo sapiens
cttttctctcttgtctcca

SEQ ID NO: 10986 - DNA, 19 bp, Homo sapiens
gcttttctctcttgtctcc

SEQ ID NO: 10987 - DNA, 19 bp, Homo sapiens
agcttttctctcttgtctc

SEQ ID NO: 10988 - DNA, 19 bp, Homo sapiens
cagcttttctctcttgtct

SEQ ID NO: 10989 - DNA, 19 bp, Homo sapiens
ccagcttttctctcttgtc

SEQ ID NO: 10990 - DNA, 19 bp, Homo sapiens
cccagcttttctctcttgt

SEQ ID NO: 10991 - DNA, 19 bp, Homo sapiens
gcccagcttttctctcttg

SEQ ID NO: 10992 - DNA, 19 bp, Homo sapiens
agcccagcttttctctctt

SEQ ID NO: 10993 - DNA, 19 bp, Homo sapiens
gagcccagcttttctctct

SEQ ID NO: 10994 - DNA, 19 bp, Homo sapiens
ggagcccagcttttctctc

SEQ ID NO: 10995 - DNA, 19 bp, Homo sapiens
gggagcccagcttttctct

SEQ ID NO: 10996 - DNA, 19 bp, Homo sapiens
ggggagcccagcttttctc

SEQ ID NO: 10997 - DNA, 19 bp, Homo sapiens
tggggagcccagcttttct

SEQ ID NO: 10998 - DNA, 19 bp, Homo sapiens
gtggggagcccagcttttc

SEQ ID NO: 10999 - DNA, 19 bp, Homo sapiens
agtggggagcccagctttt

SEQ ID NO: 11000 - DNA, 19 bp, Homo sapiens
gagtggggagcccagcttt

SEQ ID NO: 11001 - DNA, 19 bp, Homo sapiens
ggagtggggagcccagctt

SEQ ID NO: 11002 - DNA, 19 bp, Homo sapiens
aggagtggggagcccagct

SEQ ID NO: 11003 - DNA, 19 bp, Homo sapiens
caggagtggggagcccagc

SEQ ID NO: 11004 - DNA, 19 bp, Homo sapiens
ccaggagtggggagcccag

SEQ ID NO: 11005 - DNA, 19 bp, Homo sapiens
cccaggagtggggagccca

SEQ ID NO: 11006 - DNA, 19 bp, Homo sapiens
gcccaggagtggggagccc

SEQ ID NO: 11007 - DNA, 19 bp, Homo sapiens
agcccaggagtggggagcc

SEQ ID NO: 11008 - DNA, 19 bp, Homo sapiens
cagcccaggagtggggagc

SEQ ID NO: 11009 - DNA, 19 bp, Homo sapiens
acagcccaggagtggggag

SEQ ID NO: 11010 - DNA, 19 bp, Homo sapiens
gacagcccaggagtgggga

SEQ ID NO: 11011 - DNA, 19 bp, Homo sapiens
ggacagcccaggagtgggg

SEQ ID NO: 11012 - DNA, 19 bp, Homo sapiens
cggacagcccaggagtggg

SEQ ID NO: 11013 - DNA, 19 bp, Homo sapiens
gcggacagcccaggagtgg

SEQ ID NO: 11014 - DNA, 19 bp, Homo sapiens
ggcggacagcccaggagtg

SEQ ID NO: 11015 - DNA, 19 bp, Homo sapiens
gggcggacagcccaggagt

SEQ ID NO: 11016 - DNA, 19 bp, Homo sapiens
ggggcggacagcccaggag

SEQ ID NO: 11017 - DNA, 19 bp, Homo sapiens
gggggcggacagcccagga

SEQ ID NO: 11018 - DNA, 19 bp, Homo sapiens
agggggcggacagcccagg

SEQ ID NO: 11019 - DNA, 19 bp, Homo sapiens
cagggggcggacagcccag

SEQ ID NO: 11020 - DNA, 19 bp, Homo sapiens
ccagggggcggacagccca

SEQ ID NO: 11021 - DNA, 19 bp, Homo sapiens
cccagggggcggacagccc

SEQ ID NO: 11022 - DNA, 19 bp, Homo sapiens
gcccagggggcggacagcc

SEQ ID NO: 11023 - DNA, 19 bp, Homo sapiens
agcccagggggcggacagc

SEQ ID NO: 11024 - DNA, 19 bp, Homo sapiens
cagcccagggggcggacag

SEQ ID NO: 11025 - DNA, 19 bp, Homo sapiens
acagcccagggggcggaca

SEQ ID NO: 11026 - DNA, 19 bp, Homo sapiens
gacagcccagggggcggac

SEQ ID NO: 11027 - DNA, 19 bp, Homo sapiens
ggacagcccagggggcgga

SEQ ID NO: 11028 - DNA, 19 bp, Homo sapiens
cggacagcccagggggcgg

SEQ ID NO: 11029 - DNA, 19 bp, Homo sapiens
ccggacagcccagggggcg

SEQ ID NO: 11030 - DNA, 19 bp, Homo sapiens
gccggacagcccagggggc

SEQ ID NO: 11031 - DNA, 19 bp, Homo sapiens
agccggacagcccaggggg

SEQ ID NO: 11032 - DNA, 19 bp, Homo sapiens
gagccggacagcccagggg

SEQ ID NO: 11033 - DNA, 19 bp, Homo sapiens
tgagccggacagcccaggg

SEQ ID NO: 11034 - DNA, 19 bp, Homo sapiens
ctgagccggacagcccagg

SEQ ID NO: 11035 - DNA, 19 bp, Homo sapiens
cctgagccggacagcccag

SEQ ID NO: 11036 - DNA, 19 bp, Homo sapiens
gcctgagccggacagccca

SEQ ID NO: 11037 - DNA, 19 bp, Homo sapiens
ggcctgagccggacagccc

SEQ ID NO: 11038 - DNA, 19 bp, Homo sapiens
gggcctgagccggacagcc

SEQ ID NO: 11039 - DNA, 19 bp, Homo sapiens
ggggcctgagccggacagc

SEQ ID NO: 11040 - DNA, 19 bp, Homo sapiens
tggggcctgagccggacag

SEQ ID NO: 11041 - DNA, 19 bp, Homo sapiens
atggggcctgagccggaca

SEQ ID NO: 11042 - DNA, 19 bp, Homo sapiens
gatggggcctgagccggac

SEQ ID NO: 11043 - DNA, 19 bp, Homo sapiens
ggatggggcctgagccgga

SEQ ID NO: 11044 - DNA, 19 bp, Homo sapiens
cggatggggcctgagccgg

SEQ ID NO: 11045 - DNA, 19 bp, Homo sapiens
ccggatggggcctgagccg

SEQ ID NO: 11046 - DNA, 19 bp, Homo sapiens
gccggatggggcctgagcc

SEQ ID NO: 11047 - DNA, 19 bp, Homo sapiens
ggccggatggggcctgagc

SEQ ID NO: 11048 - DNA, 19 bp, Homo sapiens
gggccggatggggcctgag

SEQ ID NO: 11049 - DNA, 19 bp, Homo sapiens
ggggccggatggggcctga

SEQ ID NO: 11050 - DNA, 19 bp, Homo sapiens
aggggccggatggggcctg

SEQ ID NO: 11051 - DNA, 19 bp, Homo sapiens
caggggccggatggggcct

SEQ ID NO: 11052 - DNA, 19 bp, Homo sapiens
ccaggggccggatggggcc

SEQ ID NO: 11053 - DNA, 19 bp, Homo sapiens
gccaggggccggatggggc

SEQ ID NO: 11054 - DNA, 19 bp, Homo sapiens
tgccaggggccggatgggg

SEQ ID NO: 11055 - DNA, 19 bp, Homo sapiens
gtgccaggggccggatggg

SEQ ID NO: 11056 - DNA, 19 bp, Homo sapiens
ggtgccaggggccggatgg

SEQ ID NO: 11057 - DNA, 19 bp, Homo sapiens
gggtgccaggggccggatg

SEQ ID NO: 11058 - DNA, 19 bp, Homo sapiens
ggggtgccaggggccggat

SEQ ID NO: 11059 - DNA, 19 bp, Homo sapiens
gggggtgccaggggccgga

SEQ ID NO: 11060 - DNA, 19 bp, Homo sapiens
tgggggtgccaggggccgg

SEQ ID NO: 11061 - DNA, 19 bp, Homo sapiens
ctgggggtgccaggggccg

SEQ ID NO: 11062 - DNA, 19 bp, Homo sapiens
gctgggggtgccaggggcc

SEQ ID NO: 11063 - DNA, 19 bp, Homo sapiens
agctgggggtgccaggggc

SEQ ID NO: 11064 - DNA, 19 bp, Homo sapiens
cagctgggggtgccagggg

SEQ ID NO: 11065 - DNA, 19 bp, Homo sapiens
ccagctgggggtgccaggg

SEQ ID NO: 11066 - DNA, 19 bp, Homo sapiens
gccagctgggggtgccagg

SEQ ID NO: 11067 - DNA, 19 bp, Homo sapiens
ggccagctgggggtgccag

SEQ ID NO: 11068 - DNA, 19 bp, Homo sapiens
aggccagctgggggtgcca

SEQ ID NO: 11069 - DNA, 19 bp, Homo sapiens
gaggccagctgggggtgcc

SEQ ID NO: 11070 - DNA, 19 bp, Homo sapiens
agaggccagctgggggtgc

SEQ ID NO: 11071 - DNA, 19 bp, Homo sapiens
gagaggccagctgggggtg

SEQ ID NO: 11072 - DNA, 19 bp, Homo sapiens
ggagaggccagctgggggt

SEQ ID NO: 11073 - DNA, 19 bp, Homo sapiens
gggagaggccagctggggg

SEQ ID NO: 11074 - DNA, 19 bp, Homo sapiens
ggggagaggccagctgggg

SEQ ID NO: 11075 - DNA, 19 bp, Homo sapiens
tggggagaggccagctggg

SEQ ID NO: 11076 - DNA, 19 bp, Homo sapiens
gtggggagaggccagctgg

SEQ ID NO: 11077 - DNA, 19 bp, Homo sapiens
ggtggggagaggccagctg

SEQ ID NO: 11078 - DNA, 19 bp, Homo sapiens
tggtggggagaggccagct

SEQ ID NO: 11079 - DNA, 19 bp, Homo sapiens
gtggtggggagaggccagc

SEQ ID NO: 11080 - DNA, 19 bp, Homo sapiens
agtggtggggagaggccag

SEQ ID NO: 11081 - DNA, 19 bp, Homo sapiens
cagtggtggggagaggcca

SEQ ID NO: 11082 - DNA, 19 bp, Homo sapiens
gcagtggtggggagaggcc

SEQ ID NO: 11083 - DNA, 19 bp, Homo sapiens
tgcagtggtggggagaggc

SEQ ID NO: 11084 - DNA, 19 bp, Homo sapiens
gtgcagtggtggggagagg

SEQ ID NO: 11085 - DNA, 19 bp, Homo sapiens
agtgcagtggtggggagag

SEQ ID NO: 11086 - DNA, 19 bp, Homo sapiens
gagtgcagtggtggggaga

SEQ ID NO: 11087 - DNA, 19 bp, Homo sapiens
tgagtgcagtggtggggag

SEQ ID NO: 11088 - DNA, 19 bp, Homo sapiens
gtgagtgcagtggtgggga

SEQ ID NO: 11089 - DNA, 19 bp, Homo sapiens
agtgagtgcagtggtgggg

SEQ ID NO: 11090 - DNA, 19 bp, Homo sapiens
gagtgagtgcagtggtggg

SEQ ID NO: 11091 - DNA, 19 bp, Homo sapiens
ggagtgagtgcagtggtgg

SEQ ID NO: 11092 - DNA, 19 bp, Homo sapiens
tggagtgagtgcagtggtg

SEQ ID NO: 11093 - DNA, 19 bp, Homo sapiens
gtggagtgagtgcagtggt

SEQ ID NO: 11094 - DNA, 19 bp, Homo sapiens
ggtggagtgagtgcagtgg

SEQ ID NO: 11095 - DNA, 19 bp, Homo sapiens
gggtggagtgagtgcagtg

SEQ ID NO: 11096 - DNA, 19 bp, Homo sapiens
tgggtggagtgagtgcagt

SEQ ID NO: 11097 - DNA, 19 bp, Homo sapiens
ctgggtggagtgagtgcag

SEQ ID NO: 11098 - DNA, 19 bp, Homo sapiens
gctgggtggagtgagtgca

SEQ ID NO: 11099 - DNA, 19 bp, Homo sapiens
agctgggtggagtgagtgc

SEQ ID NO: 11100 - DNA, 19 bp, Homo sapiens
gagctgggtggagtgagtg

SEQ ID NO: 11101 - DNA, 19 bp, Homo sapiens
ggagctgggtggagtgagt

SEQ ID NO: 11102 - DNA, 19 bp, Homo sapiens
tggagctgggtggagtgag

SEQ ID NO: 11103 - DNA, 19 bp, Homo sapiens
ctggagctgggtggagtga

SEQ ID NO: 11104 - DNA, 19 bp, Homo sapiens
cctggagctgggtggagtg

SEQ ID NO: 11105 - DNA, 19 bp, Homo sapiens
gcctggagctgggtggagt

SEQ ID NO: 11106 - DNA, 19 bp, Homo sapiens
ggcctggagctgggtggag

SEQ ID NO: 11107 - DNA, 19 bp, Homo sapiens
gggcctggagctgggtgga

SEQ ID NO: 11108 - DNA, 19 bp, Homo sapiens
ggggcctggagctgggtgg

SEQ ID NO: 11109 - DNA, 19 bp, Homo sapiens
tggggcctggagctgggtg

SEQ ID NO: 11110 - DNA, 19 bp, Homo sapiens
atggggcctggagctgggt

SEQ ID NO: 11111 - DNA, 19 bp, Homo sapiens
aatggggcctggagctggg

SEQ ID NO: 11112 - DNA, 19 bp, Homo sapiens
gaatggggcctggagctgg

SEQ ID NO: 11113 - DNA, 19 bp, Homo sapiens
ggaatggggcctggagctg

SEQ ID NO: 11114 - DNA, 19 bp, Homo sapiens
aggaatggggcctggagct

SEQ ID NO: 11115 - DNA, 19 bp, Homo sapiens
caggaatggggcctggagc

SEQ ID NO: 11116 - DNA, 19 bp, Homo sapiens
ccaggaatggggcctggag

SEQ ID NO: 11117 - DNA, 19 bp, Homo sapiens
gccaggaatggggcctgga

SEQ ID NO: 11118 - DNA, 19 bp, Homo sapiens
tgccaggaatggggcctgg

SEQ ID NO: 11119 - DNA, 19 bp, Homo sapiens
ttgccaggaatggggcctg

SEQ ID NO: 11120 - DNA, 19 bp, Homo sapiens
cttgccaggaatggggcct

SEQ ID NO: 11121 - DNA, 19 bp, Homo sapiens
tcttgccaggaatggggcc

SEQ ID NO: 11122 - DNA, 19 bp, Homo sapiens
ttcttgccaggaatggggc

SEQ ID NO: 11123 - DNA, 19 bp, Homo sapiens
gttcttgccaggaatgggg

SEQ ID NO: 11124 - DNA, 19 bp, Homo sapiens
ggttcttgccaggaatggg

SEQ ID NO: 11125 - DNA, 19 bp, Homo sapiens
gggttcttgccaggaatgg

SEQ ID NO: 11126 - DNA, 19 bp, Homo sapiens
ggggttcttgccaggaatg

SEQ ID NO: 11127 - DNA, 19 bp, Homo sapiens
gggggttcttgccaggaat

SEQ ID NO: 11128 - DNA, 19 bp, Homo sapiens
agggggttcttgccaggaa

SEQ ID NO: 11129 - DNA, 19 bp, Homo sapiens
cagggggttcttgccagga

SEQ ID NO: 11130 - DNA, 19 bp, Homo sapiens
gcagggggttcttgccagg

SEQ ID NO: 11131 - DNA, 19 bp, Homo sapiens
tgcagggggttcttgccag

SEQ ID NO: 11132 - DNA, 19 bp, Homo sapiens
ctgcagggggttcttgcca

SEQ ID NO: 11133 - DNA, 19 bp, Homo sapiens
cctgcagggggttcttgcc

SEQ ID NO: 11134 - DNA, 19 bp, Homo sapiens
tcctgcagggggttcttgc

SEQ ID NO: 11135 - DNA, 19 bp, Homo sapiens
gtcctgcagggggttcttg

SEQ ID NO: 11136 - DNA, 19 bp, Homo sapiens
ggtcctgcagggggttctt

SEQ ID NO: 11137 - DNA, 19 bp, Homo sapiens
aggtcctgcagggggttct

SEQ ID NO: 11138 - DNA, 19 bp, Homo sapiens
taggtcctgcagggggttc

SEQ ID NO: 11139 - DNA, 19 bp, Homo sapiens
gtaggtcctgcagggggtt

SEQ ID NO: 11140 - DNA, 19 bp, Homo sapiens
agtaggtcctgcagggggt

SEQ ID NO: 11141 - DNA, 19 bp, Homo sapiens
aagtaggtcctgcaggggg

SEQ ID NO: 11142 - DNA, 19 bp, Homo sapiens
taagtaggtcctgcagggg

SEQ ID NO: 11143 - DNA, 19 bp, Homo sapiens
ataagtaggtcctgcaggg

SEQ ID NO: 11144 - DNA, 19 bp, Homo sapiens
cataagtaggtcctgcagg

SEQ ID NO: 11145 - DNA, 19 bp, Homo sapiens
ccataagtaggtcctgcag

SEQ ID NO: 11146 - DNA, 19 bp, Homo sapiens
cccataagtaggtcctgca

SEQ ID NO: 11147 - DNA, 19 bp, Homo sapiens
ccccataagtaggtcctgc

SEQ ID NO: 11148 - DNA, 19 bp, Homo sapiens
gccccataagtaggtcctg

SEQ ID NO: 11149 - DNA, 19 bp, Homo sapiens
tgccccataagtaggtcct

SEQ ID NO: 11150 - DNA, 19 bp, Homo sapiens
gtgccccataagtaggtcc

SEQ ID NO: 11151 - DNA, 19 bp, Homo sapiens
tgtgccccataagtaggtc

SEQ ID NO: 11152 - DNA, 19 bp, Homo sapiens
gtgtgccccataagtaggt

SEQ ID NO: 11153 - DNA, 19 bp, Homo sapiens
tgtgtgccccataagtagg

SEQ ID NO: 11154 - DNA, 19 bp, Homo sapiens
gtgtgtgccccataagtag

SEQ ID NO: 11155 - DNA, 19 bp, Homo sapiens
ggtgtgtgccccataagta

SEQ ID NO: 11156 - DNA, 19 bp, Homo sapiens
gggtgtgtgccccataagt

SEQ ID NO: 11157 - DNA, 19 bp, Homo sapiens
agggtgtgtgccccataag

SEQ ID NO: 11158 - DNA, 19 bp, Homo sapiens
gagggtgtgtgccccataa

SEQ ID NO: 11159 - DNA, 19 bp, Homo sapiens
ggagggtgtgtgccccata

SEQ ID NO: 11160 - DNA, 19 bp, Homo sapiens
aggagggtgtgtgccccat

SEQ ID NO: 11161 - DNA, 19 bp, Homo sapiens
caggagggtgtgtgcccca

SEQ ID NO: 11162 - DNA, 19 bp, Homo sapiens
gcaggagggtgtgtgcccc

SEQ ID NO: 11163 - DNA, 19 bp, Homo sapiens
agcaggagggtgtgtgccc

SEQ ID NO: 11164 - DNA, 19 bp, Homo sapiens
tagcaggagggtgtgtgcc

SEQ ID NO: 11165 - DNA, 19 bp, Homo sapiens
atagcaggagggtgtgtgc

SEQ ID NO: 11166 - DNA, 19 bp, Homo sapiens
catagcaggagggtgtgtg

SEQ ID NO: 11167 - DNA, 19 bp, Homo sapiens
ccatagcaggagggtgtgt

SEQ ID NO: 11168 - DNA, 19 bp, Homo sapiens
cccatagcaggagggtgtg

SEQ ID NO: 11169 - DNA, 19 bp, Homo sapiens
gcccatagcaggagggtgt

SEQ ID NO: 11170 - DNA, 19 bp, Homo sapiens
tgcccatagcaggagggtg

SEQ ID NO: 11171 - DNA, 19 bp, Homo sapiens
ctgcccatagcaggagggt

SEQ ID NO: 11172 - DNA, 19 bp, Homo sapiens
tctgcccatagcaggaggg

SEQ ID NO: 11173 - DNA, 19 bp, Homo sapiens
gtctgcccatagcaggagg

SEQ ID NO: 11174 - DNA, 19 bp, Homo sapiens
tgtctgcccatagcaggag

SEQ ID NO: 11175 - DNA, 19 bp, Homo sapiens
atgtctgcccatagcagga

SEQ ID NO: 11176 - DNA, 19 bp, Homo sapiens
tatgtctgcccatagcagg

SEQ ID NO: 11177 - DNA, 19 bp, Homo sapiens
gtatgtctgcccatagcag

SEQ ID NO: 11178 - DNA, 19 bp, Homo sapiens
agtatgtctgcccatagca

SEQ ID NO: 11179 - DNA, 19 bp, Homo sapiens
aagtatgtctgcccatagc

SEQ ID NO: 11180 - DNA, 19 bp, Homo sapiens
caagtatgtctgcccatag

SEQ ID NO: 11181 - DNA, 19 bp, Homo sapiens
gcaagtatgtctgcccata

SEQ ID NO: 11182 - DNA, 19 bp, Homo sapiens
tgcaagtatgtctgcccat

SEQ ID NO: 11183 - DNA, 19 bp, Homo sapiens
gtgcaagtatgtctgccca

SEQ ID NO: 11184 - DNA, 19 bp, Homo sapiens
ggtgcaagtatgtctgccc

SEQ ID NO: 11185 - DNA, 19 bp, Homo sapiens
aggtgcaagtatgtctgcc

SEQ ID NO: 11186 - DNA, 19 bp, Homo sapiens
gaggtgcaagtatgtctgc

SEQ ID NO: 11187 - DNA, 19 bp, Homo sapiens
agaggtgcaagtatgtctg

SEQ ID NO: 11188 - DNA, 19 bp, Homo sapiens
gagaggtgcaagtatgtct

SEQ ID NO: 11189 - DNA, 19 bp, Homo sapiens
tgagaggtgcaagtatgtc

SEQ ID NO: 11190 - DNA, 19 bp, Homo sapiens
gtgagaggtgcaagtatgt

SEQ ID NO: 11191 - DNA, 19 bp, Homo sapiens
ggtgagaggtgcaagtatg

SEQ ID NO: 11192 - DNA, 19 bp, Homo sapiens
tggtgagaggtgcaagtat

SEQ ID NO: 11193 - DNA, 19 bp, Homo sapiens
ctggtgagaggtgcaagta

SEQ ID NO: 11194 - DNA, 19 bp, Homo sapiens
cctggtgagaggtgcaagt

SEQ ID NO: 11195 - DNA, 19 bp, Homo sapiens
gcctggtgagaggtgcaag

SEQ ID NO: 11196 - DNA, 19 bp, Homo sapiens
ggcctggtgagaggtgcaa

SEQ ID NO: 11197 - DNA, 19 bp, Homo sapiens
aggcctggtgagaggtgca

SEQ ID NO: 11198 - DNA, 19 bp, Homo sapiens
caggcctggtgagaggtgc

SEQ ID NO: 11199 - DNA, 19 bp, Homo sapiens
ccaggcctggtgagaggtg

SEQ ID NO: 11200 - DNA, 19 bp, Homo sapiens
gccaggcctggtgagaggt

SEQ ID NO: 11201 - DNA, 19 bp, Homo sapiens
ggccaggcctggtgagagg

SEQ ID NO: 11202 - DNA, 19 bp, Homo sapiens
gggccaggcctggtgagag

SEQ ID NO: 11203 - DNA, 19 bp, Homo sapiens
ggggccaggcctggtgaga

SEQ ID NO: 11204 - DNA, 19 bp, Homo sapiens
aggggccaggcctggtgag

SEQ ID NO: 11205 - DNA, 19 bp, Homo sapiens
gaggggccaggcctggtga

SEQ ID NO: 11206 - DNA, 19 bp, Homo sapiens
ggaggggccaggcctggtg

SEQ ID NO: 11207 - DNA, 19 bp, Homo sapiens
aggaggggccaggcctggt

SEQ ID NO: 11208 - DNA, 19 bp, Homo sapiens
caggaggggccaggcctgg

SEQ ID NO: 11209 - DNA, 19 bp, Homo sapiens
ccaggaggggccaggcctg

SEQ ID NO: 11210 - DNA, 19 bp, Homo sapiens
tccaggaggggccaggcct

SEQ ID NO: 11211 - DNA, 19 bp, Homo sapiens
gtccaggaggggccaggcc

SEQ ID NO: 11212 - DNA, 19 bp, Homo sapiens
ggtccaggaggggccaggc

SEQ ID NO: 11213 - DNA, 19 bp, Homo sapiens
gggtccaggaggggccagg

SEQ ID NO: 11214 - DNA, 19 bp, Homo sapiens
ggggtccaggaggggccag

SEQ ID NO: 11215 - DNA, 19 bp, Homo sapiens
gggggtccaggaggggcca

SEQ ID NO: 11216 - DNA, 19 bp, Homo sapiens
cgggggtccaggaggggcc

SEQ ID NO: 11217 - DNA, 19 bp, Homo sapiens
gcgggggtccaggaggggc

SEQ ID NO: 11218 - DNA, 19 bp, Homo sapiens
tgcgggggtccaggagggg

SEQ ID NO: 11219 - DNA, 19 bp, Homo sapiens
ctgcgggggtccaggaggg

SEQ ID NO: 11220 - DNA, 19 bp, Homo sapiens
gctgcgggggtccaggagg

SEQ ID NO: 11221 - DNA, 19 bp, Homo sapiens
ggctgcgggggtccaggag

SEQ ID NO: 11222 - DNA, 19 bp, Homo sapiens
tggctgcgggggtccagga

SEQ ID NO: 11223 - DNA, 19 bp, Homo sapiens
atggctgcgggggtccagg

SEQ ID NO: 11224 - DNA, 19 bp, Homo sapiens
aatggctgcgggggtccag

SEQ ID NO: 11225 - DNA, 19 bp, Homo sapiens
caatggctgcgggggtcca

SEQ ID NO: 11226 - DNA, 19 bp, Homo sapiens
acaatggctgcgggggtcc

SEQ ID NO: 11227 - DNA, 19 bp, Homo sapiens
aacaatggctgcgggggtc

SEQ ID NO: 11228 - DNA, 19 bp, Homo sapiens
gaacaatggctgcgggggt

SEQ ID NO: 11229 - DNA, 19 bp, Homo sapiens
ggaacaatggctgcggggg

SEQ ID NO: 11230 - DNA, 19 bp, Homo sapiens
gggaacaatggctgcgggg

SEQ ID NO: 11231 - DNA, 19 bp, Homo sapiens
tgggaacaatggctgcggg

SEQ ID NO: 11232 - DNA, 19 bp, Homo sapiens
gtgggaacaatggctgcgg

SEQ ID NO: 11233 - DNA, 19 bp, Homo sapiens
tgtgggaacaatggctgcg

SEQ ID NO: 11234 - DNA, 19 bp, Homo sapiens
ctgtgggaacaatggctgc

SEQ ID NO: 11235 - DNA, 19 bp, Homo sapiens
gctgtgggaacaatggctg

SEQ ID NO: 11236 - DNA, 19 bp, Homo sapiens
ggctgtgggaacaatggct

SEQ ID NO: 11237 - DNA, 19 bp, Homo sapiens
cggctgtgggaacaatggc

SEQ ID NO: 11238 - DNA, 19 bp, Homo sapiens
ccggctgtgggaacaatgg

SEQ ID NO: 11239 - DNA, 19 bp, Homo sapiens
tccggctgtgggaacaatg

SEQ ID NO: 11240 - DNA, 19 bp, Homo sapiens
gtccggctgtgggaacaat

SEQ ID NO: 11241 - DNA, 19 bp, Homo sapiens
cgtccggctgtgggaacaa

SEQ ID NO: 11242 - DNA, 19 bp, Homo sapiens
ccgtccggctgtgggaaca

SEQ ID NO: 11243 - DNA, 19 bp, Homo sapiens
cccgtccggctgtgggaac

SEQ ID NO: 11244 - DNA, 19 bp, Homo sapiens
gcccgtccggctgtgggaa

SEQ ID NO: 11245 - DNA, 19 bp, Homo sapiens
tgcccgtccggctgtggga

SEQ ID NO: 11246 - DNA, 19 bp, Homo sapiens
gtgcccgtccggctgtggg

SEQ ID NO: 11247 - DNA, 19 bp, Homo sapiens
ggtgcccgtccggctgtgg

SEQ ID NO: 11248 - DNA, 19 bp, Homo sapiens
aggtgcccgtccggctgtg

SEQ ID NO: 11249 - DNA, 19 bp, Homo sapiens
aaggtgcccgtccggctgt

SEQ ID NO: 11250 - DNA, 19 bp, Homo sapiens
caaggtgcccgtccggctg

SEQ ID NO: 11251 - DNA, 19 bp, Homo sapiens
tcaaggtgcccgtccggct

SEQ ID NO: 11252 - DNA, 19 bp, Homo sapiens
ctcaaggtgcccgtccggc

SEQ ID NO: 11253 - DNA, 19 bp, Homo sapiens
gctcaaggtgcccgtccgg

SEQ ID NO: 11254 - DNA, 19 bp, Homo sapiens
agctcaaggtgcccgtccg

SEQ ID NO: 11255 - DNA, 19 bp, Homo sapiens
cagctcaaggtgcccgtcc

SEQ ID NO: 11256 - DNA, 19 bp, Homo sapiens
gcagctcaaggtgcccgtc

SEQ ID NO: 11257 - DNA, 19 bp, Homo sapiens
cgcagctcaaggtgcccgt

SEQ ID NO: 11258 - DNA, 19 bp, Homo sapiens
ccgcagctcaaggtgcccg

SEQ ID NO: 11259 - DNA, 19 bp, Homo sapiens
cccgcagctcaaggtgccc

SEQ ID NO: 11260 - DNA, 19 bp, Homo sapiens
gcccgcagctcaaggtgcc

SEQ ID NO: 11261 - DNA, 19 bp, Homo sapiens
ggcccgcagctcaaggtgc

SEQ ID NO: 11262 - DNA, 19 bp, Homo sapiens
gggcccgcagctcaaggtg

SEQ ID NO: 11263 - DNA, 19 bp, Homo sapiens
tgggcccgcagctcaaggt

SEQ ID NO: 11264 - DNA, 19 bp, Homo sapiens
ctgggcccgcagctcaagg

SEQ ID NO: 11265 - DNA, 19 bp, Homo sapiens
gctgggcccgcagctcaag

SEQ ID NO: 11266 - DNA, 19 bp, Homo sapiens
ggctgggcccgcagctcaa

SEQ ID NO: 11267 - DNA, 19 bp, Homo sapiens
tggctgggcccgcagctca

SEQ ID NO: 11268 - DNA, 19 bp, Homo sapiens
ctggctgggcccgcagctc

SEQ ID NO: 11269 - DNA, 19 bp, Homo sapiens
cctggctgggcccgcagct

SEQ ID NO: 11270 - DNA, 19 bp, Homo sapiens
gcctggctgggcccgcagc

SEQ ID NO: 11271 - DNA, 19 bp, Homo sapiens
tgcctggctgggcccgcag

SEQ ID NO: 11272 - DNA, 19 bp, Homo sapiens
gtgcctggctgggcccgca

SEQ ID NO: 11273 - DNA, 19 bp, Homo sapiens
ggtgcctggctgggcccgc

SEQ ID NO: 11274 - DNA, 19 bp, Homo sapiens
gggtgcctggctgggcccg

SEQ ID NO: 11275 - DNA, 19 bp, Homo sapiens
ggggtgcctggctgggccc

SEQ ID NO: 11276 - DNA, 19 bp, Homo sapiens
gggggtgcctggctgggcc

SEQ ID NO: 11277 - DNA, 19 bp, Homo sapiens
ggggggtgcctggctgggc

SEQ ID NO: 11278 - DNA, 19 bp, Homo sapiens
tggggggtgcctggctggg

SEQ ID NO: 11279 - DNA, 19 bp, Homo sapiens
ctggggggtgcctggctgg

SEQ ID NO: 11280 - DNA, 19 bp, Homo sapiens
cctggggggtgcctggctg

SEQ ID NO: 11281 - DNA, 19 bp, Homo sapiens
tcctggggggtgcctggct

SEQ ID NO: 11282 - DNA, 19 bp, Homo sapiens
gtcctggggggtgcctggc

SEQ ID NO: 11283 - DNA, 19 bp, Homo sapiens
agtcctggggggtgcctgg

SEQ ID NO: 11284 - DNA, 19 bp, Homo sapiens
gagtcctggggggtgcctg

SEQ ID NO: 11285 - DNA, 19 bp, Homo sapiens
cgagtcctggggggtgcct

SEQ ID NO: 11286 - DNA, 19 bp, Homo sapiens
gcgagtcctggggggtgcc

SEQ ID NO: 11287 - DNA, 19 bp, Homo sapiens
ggcgagtcctggggggtgc

SEQ ID NO: 11288 - DNA, 19 bp, Homo sapiens
aggcgagtcctggggggtg

SEQ ID NO: 11289 - DNA, 19 bp, Homo sapiens
gaggcgagtcctggggggt

SEQ ID NO: 11290 - DNA, 19 bp, Homo sapiens
agaggcgagtcctgggggg

SEQ ID NO: 11291 - DNA, 19 bp, Homo sapiens
cagaggcgagtcctggggg

SEQ ID NO: 11292 - DNA, 19 bp, Homo sapiens
gcagaggcgagtcctgggg

SEQ ID NO: 11293 - DNA, 19 bp, Homo sapiens
ggcagaggcgagtcctggg

SEQ ID NO: 11294 - DNA, 19 bp, Homo sapiens
aggcagaggcgagtcctgg

SEQ ID NO: 11295 - DNA, 19 bp, Homo sapiens
caggcagaggcgagtcctg

SEQ ID NO: 11296 - DNA, 19 bp, Homo sapiens
gcaggcagaggcgagtcct

SEQ ID NO: 11297 - DNA, 19 bp, Homo sapiens
ggcaggcagaggcgagtcc

SEQ ID NO: 11298 - DNA, 19 bp, Homo sapiens
gggcaggcagaggcgagtc

SEQ ID NO: 11299 - DNA, 19 bp, Homo sapiens
tgggcaggcagaggcgagt

SEQ ID NO: 11300 - DNA, 19 bp, Homo sapiens
gtgggcaggcagaggcgag

SEQ ID NO: 11301 - DNA, 19 bp, Homo sapiens
tgtgggcaggcagaggcga

SEQ ID NO: 11302 - DNA, 19 bp, Homo sapiens
gtgtgggcaggcagaggcg

SEQ ID NO: 11303 - DNA, 19 bp, Homo sapiens
ggtgtgggcaggcagaggc

SEQ ID NO: 11304 - DNA, 19 bp, Homo sapiens
gggtgtgggcaggcagagg

SEQ ID NO: 11305 - DNA, 19 bp, Homo sapiens
ggggtgtgggcaggcagag

SEQ ID NO: 11306 - DNA, 19 bp, Homo sapiens
tggggtgtgggcaggcaga

SEQ ID NO: 11307 - DNA, 19 bp, Homo sapiens
gtggggtgtgggcaggcag

SEQ ID NO: 11308 - DNA, 19 bp, Homo sapiens
ggtggggtgtgggcaggca

SEQ ID NO: 11309 - DNA, 19 bp, Homo sapiens
gggtggggtgtgggcaggc

SEQ ID NO: 11310 - DNA, 19 bp, Homo sapiens
tgggtggggtgtgggcagg

SEQ ID NO: 11311 - DNA, 19 bp, Homo sapiens
ctgggtggggtgtgggcag

SEQ ID NO: 11312 - DNA, 19 bp, Homo sapiens
gctgggtggggtgtgggca

SEQ ID NO: 11313 - DNA, 19 bp, Homo sapiens
ggctgggtggggtgtgggc

SEQ ID NO: 11314 - DNA, 19 bp, Homo sapiens
tggctgggtggggtgtggg

SEQ ID NO: 11315 - DNA, 19 bp, Homo sapiens
gtggctgggtggggtgtgg

SEQ ID NO: 11316 - DNA, 19 bp, Homo sapiens
tgtggctgggtggggtgtg

SEQ ID NO: 11317 - DNA, 19 bp, Homo sapiens
ctgtggctgggtggggtgt

SEQ ID NO: 11318 - DNA, 19 bp, Homo sapiens
actgtggctgggtggggtg

SEQ ID NO: 11319 - DNA, 19 bp, Homo sapiens
cactgtggctgggtggggt

SEQ ID NO: 11320 - DNA, 19 bp, Homo sapiens
gcactgtggctgggtgggg

SEQ ID NO: 11321 - DNA, 19 bp, Homo sapiens
ggcactgtggctgggtggg

SEQ ID NO: 11322 - DNA, 19 bp, Homo sapiens
tggcactgtggctgggtgg

SEQ ID NO: 11323 - DNA, 19 bp, Homo sapiens
ttggcactgtggctgggtg

SEQ ID NO: 11324 - DNA, 19 bp, Homo sapiens
cttggcactgtggctgggt

SEQ ID NO: 11325 - DNA, 19 bp, Homo sapiens
gcttggcactgtggctggg

SEQ ID NO: 11326 - DNA, 19 bp, Homo sapiens
agcttggcactgtggctgg

SEQ ID NO: 11327 - DNA, 19 bp, Homo sapiens
tagcttggcactgtggctg

SEQ ID NO: 11328 - DNA, 19 bp, Homo sapiens
gtagcttggcactgtggct

SEQ ID NO: 11329 - DNA, 19 bp, Homo sapiens
agtagcttggcactgtggc

SEQ ID NO: 11330 - DNA, 19 bp, Homo sapiens
cagtagcttggcactgtgg

SEQ ID NO: 11331 - DNA, 19 bp, Homo sapiens
ccagtagcttggcactgtg

SEQ ID NO: 11332 - DNA, 19 bp, Homo sapiens
gccagtagcttggcactgt

SEQ ID NO: 11333 - DNA, 19 bp, Homo sapiens
ggccagtagcttggcactg

SEQ ID NO: 11334 - DNA, 19 bp, Homo sapiens
cggccagtagcttggcact

SEQ ID NO: 11335 - DNA, 19 bp, Homo sapiens
tcggccagtagcttggcac

SEQ ID NO: 11336 - DNA, 19 bp, Homo sapiens
ctcggccagtagcttggca

SEQ ID NO: 11337 - DNA, 19 bp, Homo sapiens
gctcggccagtagcttggc

SEQ ID NO: 11338 - DNA, 19 bp, Homo sapiens
ggctcggccagtagcttgg

SEQ ID NO: 11339 - DNA, 19 bp, Homo sapiens
aggctcggccagtagcttg

SEQ ID NO: 11340 - DNA, 19 bp, Homo sapiens
aaggctcggccagtagctt

SEQ ID NO: 11341 - DNA, 19 bp, Homo sapiens
gaaggctcggccagtagct

SEQ ID NO: 11342 - DNA, 19 bp, Homo sapiens
ggaaggctcggccagtagc

SEQ ID NO: 11343 - DNA, 19 bp, Homo sapiens
gggaaggctcggccagtag

SEQ ID NO: 11344 - DNA, 19 bp, Homo sapiens
ggggaaggctcggccagta

SEQ ID NO: 11345 - DNA, 19 bp, Homo sapiens
tggggaaggctcggccagt

SEQ ID NO: 11346 - DNA, 19 bp, Homo sapiens
ctggggaaggctcggccag

SEQ ID NO: 11347 - DNA, 19 bp, Homo sapiens
gctggggaaggctcggcca

SEQ ID NO: 11348 - DNA, 19 bp, Homo sapiens
ggctggggaaggctcggcc

SEQ ID NO: 11349 - DNA, 19 bp, Homo sapiens
tggctggggaaggctcggc

SEQ ID NO: 11350 - DNA, 19 bp, Homo sapiens
ctggctggggaaggctcgg

SEQ ID NO: 11351 - DNA, 19 bp, Homo sapiens
cctggctggggaaggctcg

SEQ ID NO: 11352 - DNA, 19 bp, Homo sapiens
tcctggctggggaaggctc

SEQ ID NO: 11353 - DNA, 19 bp, Homo sapiens
gtcctggctggggaaggct

SEQ ID NO: 11354 - DNA, 19 bp, Homo sapiens
agtcctggctggggaaggc

SEQ ID NO: 11355 - DNA, 19 bp, Homo sapiens
tagtcctggctggggaagg

SEQ ID NO: 11356 - DNA, 19 bp, Homo sapiens
atagtcctggctggggaag

SEQ ID NO: 11357 - DNA, 19 bp, Homo sapiens
catagtcctggctggggaa

SEQ ID NO: 11358 - DNA, 19 bp, Homo sapiens
gcatagtcctggctgggga

SEQ ID NO: 11359 - DNA, 19 bp, Homo sapiens
tgcatagtcctggctgggg

SEQ ID NO: 11360 - DNA, 19 bp, Homo sapiens
gtgcatagtcctggctggg

SEQ ID NO: 11361 - DNA, 19 bp, Homo sapiens
cgtgcatagtcctggctgg

SEQ ID NO: 11362 - DNA, 19 bp, Homo sapiens
tcgtgcatagtcctggctg

SEQ ID NO: 11363 - DNA, 19 bp, Homo sapiens
gtcgtgcatagtcctggct

SEQ ID NO: 11364 - DNA, 19 bp, Homo sapiens
tgtcgtgcatagtcctggc

SEQ ID NO: 11365 - DNA, 19 bp, Homo sapiens
gtgtcgtgcatagtcctgg

SEQ ID NO: 11366 - DNA, 19 bp, Homo sapiens
ggtgtcgtgcatagtcctg

SEQ ID NO: 11367 - DNA, 19 bp, Homo sapiens
gggtgtcgtgcatagtcct

SEQ ID NO: 11368 - DNA, 19 bp, Homo sapiens
agggtgtcgtgcatagtcc

SEQ ID NO: 11369 - DNA, 19 bp, Homo sapiens
cagggtgtcgtgcatagtc

SEQ ID NO: 11370 - DNA, 19 bp, Homo sapiens
gcagggtgtcgtgcatagt

SEQ ID NO: 11371 - DNA, 19 bp, Homo sapiens
agcagggtgtcgtgcatag

SEQ ID NO: 11372 - DNA, 19 bp, Homo sapiens
cagcagggtgtcgtgcata

SEQ ID NO: 11373 - DNA, 19 bp, Homo sapiens
gcagcagggtgtcgtgcat

SEQ ID NO: 11374 - DNA, 19 bp, Homo sapiens
ggcagcagggtgtcgtgca

SEQ ID NO: 11375 - DNA, 19 bp, Homo sapiens
tggcagcagggtgtcgtgc

SEQ ID NO: 11376 - DNA, 19 bp, Homo sapiens
ctggcagcagggtgtcgtg

SEQ ID NO: 11377 - DNA, 19 bp, Homo sapiens
tctggcagcagggtgtcgt

SEQ ID NO: 11378 - DNA, 19 bp, Homo sapiens
atctggcagcagggtgtcg

SEQ ID NO: 11379 - DNA, 19 bp, Homo sapiens
catctggcagcagggtgtc

SEQ ID NO: 11380 - DNA, 19 bp, Homo sapiens
ccatctggcagcagggtgt

SEQ ID NO: 11381 - DNA, 19 bp, Homo sapiens
tccatctggcagcagggtg

SEQ ID NO: 11382 - DNA, 19 bp, Homo sapiens
ctccatctggcagcagggt

SEQ ID NO: 11383 - DNA, 19 bp, Homo sapiens
tctccatctggcagcaggg

SEQ ID NO: 11384 - DNA, 19 bp, Homo sapiens
gtctccatctggcagcagg

SEQ ID NO: 11385 - DNA, 19 bp, Homo sapiens
ggtctccatctggcagcag

SEQ ID NO: 11386 - DNA, 19 bp, Homo sapiens
aggtctccatctggcagca

SEQ ID NO: 11387 - DNA, 19 bp, Homo sapiens
aaggtctccatctggcagc

SEQ ID NO: 11388 - DNA, 19 bp, Homo sapiens
caaggtctccatctggcag

SEQ ID NO: 11389 - DNA, 19 bp, Homo sapiens
ccaaggtctccatctggca

SEQ ID NO: 11390 - DNA, 19 bp, Homo sapiens
gccaaggtctccatctggc

SEQ ID NO: 11391 - DNA, 19 bp, Homo sapiens
tgccaaggtctccatctgg

SEQ ID NO: 11392 - DNA, 19 bp, Homo sapiens
gtgccaaggtctccatctg

SEQ ID NO: 11393 - DNA, 19 bp, Homo sapiens
agtgccaaggtctccatct

SEQ ID NO: 11394 - DNA, 19 bp, Homo sapiens
cagtgccaaggtctccatc

SEQ ID NO: 11395 - DNA, 19 bp, Homo sapiens
tcagtgccaaggtctccat

SEQ ID NO: 11396 - DNA, 19 bp, Homo sapiens
gtcagtgccaaggtctcca

SEQ ID NO: 11397 - DNA, 19 bp, Homo sapiens
ggtcagtgccaaggtctcc

SEQ ID NO: 11398 - DNA, 19 bp, Homo sapiens
aggtcagtgccaaggtctc

SEQ ID NO: 11399 - DNA, 19 bp, Homo sapiens
caggtcagtgccaaggtct

SEQ ID NO: 11400 - DNA, 19 bp, Homo sapiens
ccaggtcagtgccaaggtc

SEQ ID NO: 11401 - DNA, 19 bp, Homo sapiens
tccaggtcagtgccaaggt

SEQ ID NO: 11402 - DNA, 19 bp, Homo sapiens
atccaggtcagtgccaagg

SEQ ID NO: 11403 - DNA, 19 bp, Homo sapiens
catccaggtcagtgccaag

SEQ ID NO: 11404 - DNA, 19 bp, Homo sapiens
gcatccaggtcagtgccaa

SEQ ID NO: 11405 - DNA, 19 bp, Homo sapiens
ggcatccaggtcagtgcca

SEQ ID NO: 11406 - DNA, 19 bp, Homo sapiens
tggcatccaggtcagtgcc

SEQ ID NO: 11407 - DNA, 19 bp, Homo sapiens
atggcatccaggtcagtgc

SEQ ID NO: 11408 - DNA, 19 bp, Homo sapiens
gatggcatccaggtcagtg

SEQ ID NO: 11409 - DNA, 19 bp, Homo sapiens
tgatggcatccaggtcagt

SEQ ID NO: 11410 - DNA, 19 bp, Homo sapiens
ttgatggcatccaggtcag

SEQ ID NO: 11411 - DNA, 19 bp, Homo sapiens
attgatggcatccaggtca

SEQ ID NO: 11412 - DNA, 19 bp, Homo sapiens
gattgatggcatccaggtc

SEQ ID NO: 11413 - DNA, 19 bp, Homo sapiens
ggattgatggcatccaggt

SEQ ID NO: 11414 - DNA, 19 bp, Homo sapiens
gggattgatggcatccagg

SEQ ID NO: 11415 - DNA, 19 bp, Homo sapiens
agggattgatggcatccag

SEQ ID NO: 11416 - DNA, 19 bp, Homo sapiens
gagggattgatggcatcca

SEQ ID NO: 11417 - DNA, 19 bp, Homo sapiens
tgagggattgatggcatcc

SEQ ID NO: 11418 - DNA, 19 bp, Homo sapiens
gtgagggattgatggcatc

SEQ ID NO: 11419 - DNA, 19 bp, Homo sapiens
agtgagggattgatggcat

SEQ ID NO: 11420 - DNA, 19 bp, Homo sapiens
gagtgagggattgatggca

SEQ ID NO: 11421 - DNA, 19 bp, Homo sapiens
tgagtgagggattgatggc

SEQ ID NO: 11422 - DNA, 19 bp, Homo sapiens
gtgagtgagggattgatgg

SEQ ID NO: 11423 - DNA, 19 bp, Homo sapiens
agtgagtgagggattgatg

SEQ ID NO: 11424 - DNA, 19 bp, Homo sapiens
cagtgagtgagggattgat

SEQ ID NO: 11425 - DNA, 19 bp, Homo sapiens
tcagtgagtgagggattga

SEQ ID NO: 11426 - DNA, 19 bp, Homo sapiens
gtcagtgagtgagggattg

SEQ ID NO: 11427 - DNA, 19 bp, Homo sapiens
agtcagtgagtgagggatt

SEQ ID NO: 11428 - DNA, 19 bp, Homo sapiens
aagtcagtgagtgagggat

SEQ ID NO: 11429 - DNA, 19 bp, Homo sapiens
gaagtcagtgagtgaggga

SEQ ID NO: 11430 - DNA, 19 bp, Homo sapiens
cgaagtcagtgagtgaggg

SEQ ID NO: 11431 - DNA, 19 bp, Homo sapiens
tcgaagtcagtgagtgagg

SEQ ID NO: 11432 - DNA, 19 bp, Homo sapiens
gtcgaagtcagtgagtgag

SEQ ID NO: 11433 - DNA, 19 bp, Homo sapiens
agtcgaagtcagtgagtga

SEQ ID NO: 11434 - DNA, 19 bp, Homo sapiens
aagtcgaagtcagtgagtg

SEQ ID NO: 11435 - DNA, 19 bp, Homo sapiens
gaagtcgaagtcagtgagt

SEQ ID NO: 11436 - DNA, 19 bp, Homo sapiens
ggaagtcgaagtcagtgag

SEQ ID NO: 11437 - DNA, 19 bp, Homo sapiens
tggaagtcgaagtcagtga

SEQ ID NO: 11438 - DNA, 19 bp, Homo sapiens
ctggaagtcgaagtcagtg

SEQ ID NO: 11439 - DNA, 19 bp, Homo sapiens
cctggaagtcgaagtcagt

SEQ ID NO: 11440 - DNA, 19 bp, Homo sapiens
ccctggaagtcgaagtcag

SEQ ID NO: 11441 - DNA, 19 bp, Homo sapiens
tccctggaagtcgaagtca

SEQ ID NO: 11442 - DNA, 19 bp, Homo sapiens
ttccctggaagtcgaagtc

SEQ ID NO: 11443 - DNA, 19 bp, Homo sapiens
tttccctggaagtcgaagt

SEQ ID NO: 11444 - DNA, 19 bp, Homo sapiens
gtttccctggaagtcgaag

SEQ ID NO: 11445 - DNA, 19 bp, Homo sapiens
ggtttccctggaagtcgaa

SEQ ID NO: 11446 - DNA, 19 bp, Homo sapiens
aggtttccctggaagtcga

SEQ ID NO: 11447 - DNA, 19 bp, Homo sapiens
caggtttccctggaagtcg

SEQ ID NO: 11448 - DNA, 19 bp, Homo sapiens
acaggtttccctggaagtc

SEQ ID NO: 11449 - DNA, 19 bp, Homo sapiens
cacaggtttccctggaagt

SEQ ID NO: 11450 - DNA, 19 bp, Homo sapiens
ccacaggtttccctggaag

SEQ ID NO: 11451 - DNA, 19 bp, Homo sapiens
cccacaggtttccctggaa

SEQ ID NO: 11452 - DNA, 19 bp, Homo sapiens
tcccacaggtttccctgga

SEQ ID NO: 11453 - DNA, 19 bp, Homo sapiens
ttcccacaggtttccctgg

SEQ ID NO: 11454 - DNA, 19 bp, Homo sapiens
gttcccacaggtttccctg

SEQ ID NO: 11455 - DNA, 19 bp, Homo sapiens
tgttcccacaggtttccct

SEQ ID NO: 11456 - DNA, 19 bp, Homo sapiens
ctgttcccacaggtttccc

SEQ ID NO: 11457 - DNA, 19 bp, Homo sapiens
actgttcccacaggtttcc

SEQ ID NO: 11458 - DNA, 19 bp, Homo sapiens
aactgttcccacaggtttc

SEQ ID NO: 11459 - DNA, 19 bp, Homo sapiens
caactgttcccacaggttt

SEQ ID NO: 11460 - DNA, 19 bp, Homo sapiens
tcaactgttcccacaggtt

SEQ ID NO: 11461 - DNA, 19 bp, Homo sapiens
ttcaactgttcccacaggt

SEQ ID NO: 11462 - DNA, 19 bp, Homo sapiens
cttcaactgttcccacagg

SEQ ID NO: 11463 - DNA, 19 bp, Homo sapiens
ccttcaactgttcccacag

SEQ ID NO: 11464 - DNA, 19 bp, Homo sapiens
tccttcaactgttcccaca

SEQ ID NO: 11465 - DNA, 19 bp, Homo sapiens
atccttcaactgttcccac

SEQ ID NO: 11466 - DNA, 19 bp, Homo sapiens
catccttcaactgttccca

SEQ ID NO: 11467 - DNA, 19 bp, Homo sapiens
tcatccttcaactgttccc

SEQ ID NO: 11468 - DNA, 19 bp, Homo sapiens
atcatccttcaactgttcc

SEQ ID NO: 11469 - DNA, 19 bp, Homo sapiens
tatcatccttcaactgttc

SEQ ID NO: 11470 - DNA, 19 bp, Homo sapiens
ctatcatccttcaactgtt

SEQ ID NO: 11471 - DNA, 19 bp, Homo sapiens
gctatcatccttcaactgt

SEQ ID NO: 11472 - DNA, 19 bp, Homo sapiens
agctatcatccttcaactg

SEQ ID NO: 11473 - DNA, 19 bp, Homo sapiens
aagctatcatccttcaact

SEQ ID NO: 11474 - DNA, 19 bp, Homo sapiens
caagctatcatccttcaac

SEQ ID NO: 11475 - DNA, 19 bp, Homo sapiens
ccaagctatcatccttcaa

SEQ ID NO: 11476 - DNA, 19 bp, Homo sapiens
gccaagctatcatccttca

SEQ ID NO: 11477 - DNA, 19 bp, Homo sapiens
ggccaagctatcatccttc

SEQ ID NO: 11478 - DNA, 19 bp, Homo sapiens
gggccaagctatcatcctt

SEQ ID NO: 11479 - DNA, 19 bp, Homo sapiens
agggccaagctatcatcct

SEQ ID NO: 11480 - DNA, 19 bp, Homo sapiens
gagggccaagctatcatcc

SEQ ID NO: 11481 - DNA, 19 bp, Homo sapiens
cgagggccaagctatcatc

SEQ ID NO: 11482 - DNA, 19 bp, Homo sapiens
tcgagggccaagctatcat

SEQ ID NO: 11483 - DNA, 19 bp, Homo sapiens
gtcgagggccaagctatca

SEQ ID NO: 11484 - DNA, 19 bp, Homo sapiens
ggtcgagggccaagctatc

SEQ ID NO: 11485 - DNA, 19 bp, Homo sapiens
gggtcgagggccaagctat

SEQ ID NO: 11486 - DNA, 19 bp, Homo sapiens
ggggtcgagggccaagcta

SEQ ID NO: 11487 - DNA, 19 bp, Homo sapiens
gggggtcgagggccaagct

SEQ ID NO: 11488 - DNA, 19 bp, Homo sapiens
agggggtcgagggccaagc

SEQ ID NO: 11489 - DNA, 19 bp, Homo sapiens
cagggggtcgagggccaag

SEQ ID NO: 11490 - DNA, 19 bp, Homo sapiens
ccagggggtcgagggccaa

SEQ ID NO: 11491 - DNA, 19 bp, Homo sapiens
accagggggtcgagggcca

SEQ ID NO: 11492 - DNA, 19 bp, Homo sapiens
taccagggggtcgagggcc

SEQ ID NO: 11493 - DNA, 19 bp, Homo sapiens
gtaccagggggtcgagggc

SEQ ID NO: 11494 - DNA, 19 bp, Homo sapiens
agtaccagggggtcgaggg

SEQ ID NO: 11495 - DNA, 19 bp, Homo sapiens
cagtaccagggggtcgagg

SEQ ID NO: 11496 - DNA, 19 bp, Homo sapiens
ccagtaccagggggtcgag

SEQ ID NO: 11497 - DNA, 19 bp, Homo sapiens
accagtaccagggggtcga

SEQ ID NO: 11498 - DNA, 19 bp, Homo sapiens
caccagtaccagggggtcg

SEQ ID NO: 11499 - DNA, 19 bp, Homo sapiens
tcaccagtaccagggggtc

SEQ ID NO: 11500 - DNA, 19 bp, Homo sapiens
gtcaccagtaccagggggt

SEQ ID NO: 11501 - DNA, 19 bp, Homo sapiens
ggtcaccagtaccaggggg

SEQ ID NO: 11502 - DNA, 19 bp, Homo sapiens
aggtcaccagtaccagggg

SEQ ID NO: 11503 - DNA, 19 bp, Homo sapiens
gaggtcaccagtaccaggg

SEQ ID NO: 11504 - DNA, 19 bp, Homo sapiens
tgaggtcaccagtaccagg

SEQ ID NO: 11505 - DNA, 19 bp, Homo sapiens
atgaggtcaccagtaccag

SEQ ID NO: 11506 - DNA, 19 bp, Homo sapiens
gatgaggtcaccagtacca

SEQ ID NO: 11507 - DNA, 19 bp, Homo sapiens
ggatgaggtcaccagtacc

SEQ ID NO: 11508 - DNA, 19 bp, Homo sapiens
gggatgaggtcaccagtac

SEQ ID NO: 11509 - DNA, 19 bp, Homo sapiens
ggggatgaggtcaccagta

SEQ ID NO: 11510 - DNA, 19 bp, Homo sapiens
cggggatgaggtcaccagt

SEQ ID NO: 11511 - DNA, 19 bp, Homo sapiens
tcggggatgaggtcaccag

SEQ ID NO: 11512 - DNA, 19 bp, Homo sapiens
gtcggggatgaggtcacca

SEQ ID NO: 11513 - DNA, 19 bp, Homo sapiens
tgtcggggatgaggtcacc

SEQ ID NO: 11514 - DNA, 19 bp, Homo sapiens
atgtcggggatgaggtcac

SEQ ID NO: 11515 - DNA, 19 bp, Homo sapiens
gatgtcggggatgaggtca

SEQ ID NO: 11516 - DNA, 19 bp, Homo sapiens
tgatgtcggggatgaggtc

SEQ ID NO: 11517 - DNA, 19 bp, Homo sapiens
atgatgtcggggatgaggt

SEQ ID NO: 11518 - DNA, 19 bp, Homo sapiens
gatgatgtcggggatgagg

SEQ ID NO: 11519 - DNA, 19 bp, Homo sapiens
agatgatgtcggggatgag

SEQ ID NO: 11520 - DNA, 19 bp, Homo sapiens
aagatgatgtcggggatga

SEQ ID NO: 11521 - DNA, 19 bp, Homo sapiens
gaagatgatgtcggggatg

SEQ ID NO: 11522 - DNA, 19 bp, Homo sapiens
cgaagatgatgtcggggat

SEQ ID NO: 11523 - DNA, 19 bp, Homo sapiens
tcgaagatgatgtcgggga

SEQ ID NO: 11524 - DNA, 19 bp, Homo sapiens
atcgaagatgatgtcgggg

SEQ ID NO: 11525 - DNA, 19 bp, Homo sapiens
catcgaagatgatgtcggg

SEQ ID NO: 11526 - DNA, 19 bp, Homo sapiens
gcatcgaagatgatgtcgg

SEQ ID NO: 11527 - DNA, 19 bp, Homo sapiens
ggcatcgaagatgatgtcg

SEQ ID NO: 11528 - DNA, 19 bp, Homo sapiens
tggcatcgaagatgatgtc

SEQ ID NO: 11529 - DNA, 19 bp, Homo sapiens
gtggcatcgaagatgatgt

SEQ ID NO: 11530 - DNA, 19 bp, Homo sapiens
ggtggcatcgaagatgatg

SEQ ID NO: 11531 - DNA, 19 bp, Homo sapiens
tggtggcatcgaagatgat

SEQ ID NO: 11532 - DNA, 19 bp, Homo sapiens
gtggtggcatcgaagatga

SEQ ID NO: 11533 - DNA, 19 bp, Homo sapiens
ggtggtggcatcgaagatg

SEQ ID NO: 11534 - DNA, 19 bp, Homo sapiens
gggtggtggcatcgaagat

SEQ ID NO: 11535 - DNA, 19 bp, Homo sapiens
ggggtggtggcatcgaaga

SEQ ID NO: 11536 - DNA, 19 bp, Homo sapiens
tggggtggtggcatcgaag

SEQ ID NO: 11537 - DNA, 19 bp, Homo sapiens
ctggggtggtggcatcgaa

SEQ ID NO: 11538 - DNA, 19 bp, Homo sapiens
gctggggtggtggcatcga

SEQ ID NO: 11539 - DNA, 19 bp, Homo sapiens
ggctggggtggtggcatcg

SEQ ID NO: 11540 - DNA, 19 bp, Homo sapiens
tggctggggtggtggcatc

SEQ ID NO: 11541 - DNA, 19 bp, Homo sapiens
gtggctggggtggtggcat

SEQ ID NO: 11542 - DNA, 19 bp, Homo sapiens
ggtggctggggtggtggca

SEQ ID NO: 11543 - DNA, 19 bp, Homo sapiens
tggtggctggggtggtggc

SEQ ID NO: 11544 - DNA, 19 bp, Homo sapiens
gtggtggctggggtggtgg

SEQ ID NO: 11545 - DNA, 19 bp, Homo sapiens
ggtggtggctggggtggtg

SEQ ID NO: 11546 - DNA, 19 bp, Homo sapiens
aggtggtggctggggtggt

SEQ ID NO: 11547 - DNA, 19 bp, Homo sapiens
gaggtggtggctggggtgg

SEQ ID NO: 11548 - DNA, 19 bp, Homo sapiens
tgaggtggtggctggggtg

SEQ ID NO: 11549 - DNA, 19 bp, Homo sapiens
gtgaggtggtggctggggt

SEQ ID NO: 11550 - DNA, 19 bp, Homo sapiens
agtgaggtggtggctgggg

SEQ ID NO: 11551 - DNA, 19 bp, Homo sapiens
cagtgaggtggtggctggg

SEQ ID NO: 11552 - DNA, 19 bp, Homo sapiens
gcagtgaggtggtggctgg

SEQ ID NO: 11553 - DNA, 19 bp, Homo sapiens
agcagtgaggtggtggctg

SEQ ID NO: 11554 - DNA, 19 bp, Homo sapiens
aagcagtgaggtggtggct

SEQ ID NO: 11555 - DNA, 19 bp, Homo sapiens
gaagcagtgaggtggtggc

SEQ ID NO: 11556 - DNA, 19 bp, Homo sapiens
ggaagcagtgaggtggtgg

SEQ ID NO: 11557 - DNA, 19 bp, Homo sapiens
gggaagcagtgaggtggtg

SEQ ID NO: 11558 - DNA, 19 bp, Homo sapiens
ggggaagcagtgaggtggt

SEQ ID NO: 11559 - DNA, 19 bp, Homo sapiens
gggggaagcagtgaggtgg

SEQ ID NO: 11560 - DNA, 19 bp, Homo sapiens
ggggggaagcagtgaggtg

SEQ ID NO: 11561 - DNA, 19 bp, Homo sapiens
aggggggaagcagtgaggt

SEQ ID NO: 11562 - DNA, 19 bp, Homo sapiens
caggggggaagcagtgagg

SEQ ID NO: 11563 - DNA, 19 bp, Homo sapiens
ccaggggggaagcagtgag

SEQ ID NO: 11564 - DNA, 19 bp, Homo sapiens
cccaggggggaagcagtga

SEQ ID NO: 11565 - DNA, 19 bp, Homo sapiens
gcccaggggggaagcagtg

SEQ ID NO: 11566 - DNA, 19 bp, Homo sapiens
ggcccaggggggaagcagt

SEQ ID NO: 11567 - DNA, 19 bp, Homo sapiens
gggcccaggggggaagcag

SEQ ID NO: 11568 - DNA, 19 bp, Homo sapiens
agggcccaggggggaagca

SEQ ID NO: 11569 - DNA, 19 bp, Homo sapiens
cagggcccaggggggaagc

SEQ ID NO: 11570 - DNA, 19 bp, Homo sapiens
acagggcccaggggggaag

SEQ ID NO: 11571 - DNA, 19 bp, Homo sapiens
gacagggcccaggggggaa

SEQ ID NO: 11572 - DNA, 19 bp, Homo sapiens
agacagggcccagggggga

SEQ ID NO: 11573 - DNA, 19 bp, Homo sapiens
cagacagggcccagggggg

SEQ ID NO: 11574 - DNA, 19 bp, Homo sapiens
tcagacagggcccaggggg

SEQ ID NO: 11575 - DNA, 19 bp, Homo sapiens
gtcagacagggcccagggg

SEQ ID NO: 11576 - DNA, 19 bp, Homo sapiens
tgtcagacagggcccaggg

SEQ ID NO: 11577 - DNA, 19 bp, Homo sapiens
ctgtcagacagggcccagg

SEQ ID NO: 11578 - DNA, 19 bp, Homo sapiens
tctgtcagacagggcccag

SEQ ID NO: 11579 - DNA, 19 bp, Homo sapiens
ctctgtcagacagggccca

SEQ ID NO: 11580 - DNA, 19 bp, Homo sapiens
tctctgtcagacagggccc

SEQ ID NO: 11581 - DNA, 19 bp, Homo sapiens
gtctctgtcagacagggcc

SEQ ID NO: 11582 - DNA, 19 bp, Homo sapiens
tgtctctgtcagacagggc

SEQ ID NO: 11583 - DNA, 19 bp, Homo sapiens
ctgtctctgtcagacaggg

SEQ ID NO: 11584 - DNA, 19 bp, Homo sapiens
cctgtctctgtcagacagg

SEQ ID NO: 11585 - DNA, 19 bp, Homo sapiens
gcctgtctctgtcagacag

SEQ ID NO: 11586 - DNA, 19 bp, Homo sapiens
tgcctgtctctgtcagaca

SEQ ID NO: 11587 - DNA, 19 bp, Homo sapiens
ctgcctgtctctgtcagac

SEQ ID NO: 11588 - DNA, 19 bp, Homo sapiens
actgcctgtctctgtcaga

SEQ ID NO: 11589 - DNA, 19 bp, Homo sapiens
cactgcctgtctctgtcag

SEQ ID NO: 11590 - DNA, 19 bp, Homo sapiens
ccactgcctgtctctgtca

SEQ ID NO: 11591 - DNA, 19 bp, Homo sapiens
cccactgcctgtctctgtc

SEQ ID NO: 11592 - DNA, 19 bp, Homo sapiens
ccccactgcctgtctctgt

SEQ ID NO: 11593 - DNA, 19 bp, Homo sapiens
gccccactgcctgtctctg

SEQ ID NO: 11594 - DNA, 19 bp, Homo sapiens
tgccccactgcctgtctct

SEQ ID NO: 11595 - DNA, 19 bp, Homo sapiens
ctgccccactgcctgtctc

SEQ ID NO: 11596 - DNA, 19 bp, Homo sapiens
cctgccccactgcctgtct

SEQ ID NO: 11597 - DNA, 19 bp, Homo sapiens
acctgccccactgcctgtc

SEQ ID NO: 11598 - DNA, 19 bp, Homo sapiens
cacctgccccactgcctgt

SEQ ID NO: 11599 - DNA, 19 bp, Homo sapiens
tcacctgccccactgcctg

SEQ ID NO: 11600 - DNA, 19 bp, Homo sapiens
gtcacctgccccactgcct

SEQ ID NO: 11601 - DNA, 19 bp, Homo sapiens
agtcacctgccccactgcc

SEQ ID NO: 11602 - DNA, 19 bp, Homo sapiens
aagtcacctgccccactgc

SEQ ID NO: 11603 - DNA, 19 bp, Homo sapiens
caagtcacctgccccactg

SEQ ID NO: 11604 - DNA, 19 bp, Homo sapiens
ccaagtcacctgccccact

SEQ ID NO: 11605 - DNA, 19 bp, Homo sapiens
gccaagtcacctgccccac

SEQ ID NO: 11606 - DNA, 19 bp, Homo sapiens
tgccaagtcacctgcccca

SEQ ID NO: 11607 - DNA, 19 bp, Homo sapiens
ctgccaagtcacctgcccc

SEQ ID NO: 11608 - DNA, 19 bp, Homo sapiens
gctgccaagtcacctgccc

SEQ ID NO: 11609 - DNA, 19 bp, Homo sapiens
ggctgccaagtcacctgcc

SEQ ID NO: 11610 - DNA, 19 bp, Homo sapiens
gggctgccaagtcacctgc

SEQ ID NO: 11611 - DNA, 19 bp, Homo sapiens
ggggctgccaagtcacctg

SEQ ID NO: 11612 - DNA, 19 bp, Homo sapiens
cggggctgccaagtcacct

SEQ ID NO: 11613 - DNA, 19 bp, Homo sapiens
ccggggctgccaagtcacc

SEQ ID NO: 11614 - DNA, 19 bp, Homo sapiens
cccggggctgccaagtcac

SEQ ID NO: 11615 - DNA, 19 bp, Homo sapiens
gcccggggctgccaagtca

SEQ ID NO: 11616 - DNA, 19 bp, Homo sapiens
tgcccggggctgccaagtc

SEQ ID NO: 11617 - DNA, 19 bp, Homo sapiens
ctgcccggggctgccaagt

SEQ ID NO: 11618 - DNA, 19 bp, Homo sapiens
actgcccggggctgccaag

SEQ ID NO: 11619 - DNA, 19 bp, Homo sapiens
cactgcccggggctgccaa

SEQ ID NO: 11620 - DNA, 19 bp, Homo sapiens
ccactgcccggggctgcca

SEQ ID NO: 11621 - DNA, 19 bp, Homo sapiens
accactgcccggggctgcc

SEQ ID NO: 11622 - DNA, 19 bp, Homo sapiens
caccactgcccggggctgc

SEQ ID NO: 11623 - DNA, 19 bp, Homo sapiens
ccaccactgcccggggctg

SEQ ID NO: 11624 - DNA, 19 bp, Homo sapiens
gccaccactgcccggggct

SEQ ID NO: 11625 - DNA, 19 bp, Homo sapiens
agccaccactgcccggggc

SEQ ID NO: 11626 - DNA, 19 bp, Homo sapiens
gagccaccactgcccgggg

SEQ ID NO: 11627 - DNA, 19 bp, Homo sapiens
ggagccaccactgcccggg

SEQ ID NO: 11628 - DNA, 19 bp, Homo sapiens
cggagccaccactgcccgg

SEQ ID NO: 11629 - DNA, 19 bp, Homo sapiens
ccggagccaccactgcccg

SEQ ID NO: 11630 - DNA, 19 bp, Homo sapiens
cccggagccaccactgccc

SEQ ID NO: 11631 - DNA, 19 bp, Homo sapiens
ccccggagccaccactgcc

SEQ ID NO: 11632 - DNA, 19 bp, Homo sapiens
gccccggagccaccactgc

SEQ ID NO: 11633 - DNA, 19 bp, Homo sapiens
tgccccggagccaccactg

SEQ ID NO: 11634 - DNA, 19 bp, Homo sapiens
gtgccccggagccaccact

SEQ ID NO: 11635 - DNA, 19 bp, Homo sapiens
agtgccccggagccaccac

SEQ ID NO: 11636 - DNA, 19 bp, Homo sapiens
cagtgccccggagccacca

SEQ ID NO: 11637 - DNA, 19 bp, Homo sapiens
ccagtgccccggagccacc

SEQ ID NO: 11638 - DNA, 19 bp, Homo sapiens
cccagtgccccggagccac

SEQ ID NO: 11639 - DNA, 19 bp, Homo sapiens
acccagtgccccggagcca

SEQ ID NO: 11640 - DNA, 19 bp, Homo sapiens
cacccagtgccccggagcc

SEQ ID NO: 11641 - DNA, 19 bp, Homo sapiens
tcacccagtgccccggagc

SEQ ID NO: 11642 - DNA, 19 bp, Homo sapiens
gtcacccagtgccccggag

SEQ ID NO: 11643 - DNA, 19 bp, Homo sapiens
ggtcacccagtgccccgga

SEQ ID NO: 11644 - DNA, 19 bp, Homo sapiens
aggtcacccagtgccccgg

SEQ ID NO: 11645 - DNA, 19 bp, Homo sapiens
caggtcacccagtgccccg

SEQ ID NO: 11646 - DNA, 19 bp, Homo sapiens
gcaggtcacccagtgcccc

SEQ ID NO: 11647 - DNA, 19 bp, Homo sapiens
tgcaggtcacccagtgccc

SEQ ID NO: 11648 - DNA, 19 bp, Homo sapiens
gtgcaggtcacccagtgcc

SEQ ID NO: 11649 - DNA, 19 bp, Homo sapiens
ggtgcaggtcacccagtgc

SEQ ID NO: 11650 - DNA, 19 bp, Homo sapiens
aggtgcaggtcacccagtg

SEQ ID NO: 11651 - DNA, 19 bp, Homo sapiens
gaggtgcaggtcacccagt

SEQ ID NO: 11652 - DNA, 19 bp, Homo sapiens
tgaggtgcaggtcacccag

SEQ ID NO: 11653 - DNA, 19 bp, Homo sapiens
gtgaggtgcaggtcaccca

SEQ ID NO: 11654 - DNA, 19 bp, Homo sapiens
ggtgaggtgcaggtcaccc

SEQ ID NO: 11655 - DNA, 19 bp, Homo sapiens
tggtgaggtgcaggtcacc

SEQ ID NO: 11656 - DNA, 19 bp, Homo sapiens
gtggtgaggtgcaggtcac

SEQ ID NO: 11657 - DNA, 19 bp, Homo sapiens
ggtggtgaggtgcaggtca

SEQ ID NO: 11658 - DNA, 19 bp, Homo sapiens
gggtggtgaggtgcaggtc

SEQ ID NO: 11659 - DNA, 19 bp, Homo sapiens
agggtggtgaggtgcaggt

SEQ ID NO: 11660 - DNA, 19 bp, Homo sapiens
gagggtggtgaggtgcagg

SEQ ID NO: 11661 - DNA, 19 bp, Homo sapiens
agagggtggtgaggtgcag

SEQ ID NO: 11662 - DNA, 19 bp, Homo sapiens
tagagggtggtgaggtgca

SEQ ID NO: 11663 - DNA, 19 bp, Homo sapiens
gtagagggtggtgaggtgc

SEQ ID NO: 11664 - DNA, 19 bp, Homo sapiens
agtagagggtggtgaggtg

SEQ ID NO: 11665 - DNA, 19 bp, Homo sapiens
gagtagagggtggtgaggt

SEQ ID NO: 11666 - DNA, 19 bp, Homo sapiens
agagtagagggtggtgagg

SEQ ID NO: 11667 - DNA, 19 bp, Homo sapiens
cagagtagagggtggtgag

SEQ ID NO: 11668 - DNA, 19 bp, Homo sapiens
gcagagtagagggtggtga

SEQ ID NO: 11669 - DNA, 19 bp, Homo sapiens
ggcagagtagagggtggtg

SEQ ID NO: 11670 - DNA, 19 bp, Homo sapiens
aggcagagtagagggtggt

SEQ ID NO: 11671 - DNA, 19 bp, Homo sapiens
aaggcagagtagagggtgg

SEQ ID NO: 11672 - DNA, 19 bp, Homo sapiens
aaaggcagagtagagggtg

SEQ ID NO: 11673 - DNA, 19 bp, Homo sapiens
taaaggcagagtagagggt

SEQ ID NO: 11674 - DNA, 19 bp, Homo sapiens
ataaaggcagagtagaggg

SEQ ID NO: 11675 - DNA, 19 bp, Homo sapiens
cataaaggcagagtagagg

SEQ ID NO: 11676 - DNA, 19 bp, Homo sapiens
ccataaaggcagagtagag

SEQ ID NO: 11677 - DNA, 19 bp, Homo sapiens
tccataaaggcagagtaga

SEQ ID NO: 11678 - DNA, 19 bp, Homo sapiens
ctccataaaggcagagtag

SEQ ID NO: 11679 - DNA, 19 bp, Homo sapiens
gctccataaaggcagagta

SEQ ID NO: 11680 - DNA, 19 bp, Homo sapiens
agctccataaaggcagagt

SEQ ID NO: 11681 - DNA, 19 bp, Homo sapiens
cagctccataaaggcagag

SEQ ID NO: 11682 - DNA, 19 bp, Homo sapiens
ccagctccataaaggcaga

SEQ ID NO: 11683 - DNA, 19 bp, Homo sapiens
tccagctccataaaggcag

SEQ ID NO: 11684 - DNA, 19 bp, Homo sapiens
ctccagctccataaaggca

SEQ ID NO: 11685 - DNA, 19 bp, Homo sapiens
gctccagctccataaaggc

SEQ ID NO: 11686 - DNA, 19 bp, Homo sapiens
ggctccagctccataaagg

SEQ ID NO: 11687 - DNA, 19 bp, Homo sapiens
gggctccagctccataaag

SEQ ID NO: 11688 - DNA, 19 bp, Homo sapiens
tgggctccagctccataaa

SEQ ID NO: 11689 - DNA, 19 bp, Homo sapiens
gtgggctccagctccataa

SEQ ID NO: 11690 - DNA, 19 bp, Homo sapiens
cgtgggctccagctccata

SEQ ID NO: 11691 - DNA, 19 bp, Homo sapiens
gcgtgggctccagctccat

SEQ ID NO: 11692 - DNA, 19 bp, Homo sapiens
ggcgtgggctccagctcca

SEQ ID NO: 11693 - DNA, 19 bp, Homo sapiens
gggcgtgggctccagctcc

SEQ ID NO: 11694 - DNA, 19 bp, Homo sapiens
ggggcgtgggctccagctc

SEQ ID NO: 11695 - DNA, 19 bp, Homo sapiens
gggggcgtgggctccagct

SEQ ID NO: 11696 - DNA, 19 bp, Homo sapiens
ggggggcgtgggctccagc

SEQ ID NO: 11697 - DNA, 19 bp, Homo sapiens
tggggggcgtgggctccag

SEQ ID NO: 11698 - DNA, 19 bp, Homo sapiens
gtggggggcgtgggctcca

SEQ ID NO: 11699 - DNA, 19 bp, Homo sapiens
cgtggggggcgtgggctcc

SEQ ID NO: 11700 - DNA, 19 bp, Homo sapiens
ccgtggggggcgtgggctc

SEQ ID NO: 11701 - DNA, 19 bp, Homo sapiens
gccgtggggggcgtgggct

SEQ ID NO: 11702 - DNA, 19 bp, Homo sapiens
ggccgtggggggcgtgggc

SEQ ID NO: 11703 - DNA, 19 bp, Homo sapiens
gggccgtggggggcgtggg

SEQ ID NO: 11704 - DNA, 19 bp, Homo sapiens
ggggccgtggggggcgtgg

SEQ ID NO: 11705 - DNA, 19 bp, Homo sapiens
aggggccgtggggggcgtg

SEQ ID NO: 11706 - DNA, 19 bp, Homo sapiens
caggggccgtggggggcgt

SEQ ID NO: 11707 - DNA, 19 bp, Homo sapiens
gcaggggccgtggggggcg

SEQ ID NO: 11708 - DNA, 19 bp, Homo sapiens
tgcaggggccgtggggggc

SEQ ID NO: 11709 - DNA, 19 bp, Homo sapiens
ctgcaggggccgtgggggg

SEQ ID NO: 11710 - DNA, 19 bp, Homo sapiens
cctgcaggggccgtggggg

SEQ ID NO: 11711 - DNA, 19 bp, Homo sapiens
gcctgcaggggccgtgggg

SEQ ID NO: 11712 - DNA, 19 bp, Homo sapiens
ggcctgcaggggccgtggg

SEQ ID NO: 11713 - DNA, 19 bp, Homo sapiens
gggcctgcaggggccgtgg

SEQ ID NO: 11714 - DNA, 19 bp, Homo sapiens
ggggcctgcaggggccgtg

SEQ ID NO: 11715 - DNA, 19 bp, Homo sapiens
aggggcctgcaggggccgt

SEQ ID NO: 11716 - DNA, 19 bp, Homo sapiens
gaggggcctgcaggggccg

SEQ ID NO: 11717 - DNA, 19 bp, Homo sapiens
agaggggcctgcaggggcc

SEQ ID NO: 11718 - DNA, 19 bp, Homo sapiens
cagaggggcctgcaggggc

SEQ ID NO: 11719 - DNA, 19 bp, Homo sapiens
acagaggggcctgcagggg

SEQ ID NO: 11720 - DNA, 19 bp, Homo sapiens
cacagaggggcctgcaggg

SEQ ID NO: 11721 - DNA, 19 bp, Homo sapiens
acacagaggggcctgcagg

SEQ ID NO: 11722 - DNA, 19 bp, Homo sapiens
tacacagaggggcctgcag

SEQ ID NO: 11723 - DNA, 19 bp, Homo sapiens
gtacacagaggggcctgca

SEQ ID NO: 11724 - DNA, 19 bp, Homo sapiens
ggtacacagaggggcctgc

SEQ ID NO: 11725 - DNA, 19 bp, Homo sapiens
aggtacacagaggggcctg

SEQ ID NO: 11726 - DNA, 19 bp, Homo sapiens
gaggtacacagaggggcct

SEQ ID NO: 11727 - DNA, 19 bp, Homo sapiens
tgaggtacacagaggggcc

SEQ ID NO: 11728 - DNA, 19 bp, Homo sapiens
ctgaggtacacagaggggc

SEQ ID NO: 11729 - DNA, 19 bp, Homo sapiens
gctgaggtacacagagggg

SEQ ID NO: 11730 - DNA, 19 bp, Homo sapiens
ggctgaggtacacagaggg

SEQ ID NO: 11731 - DNA, 19 bp, Homo sapiens
gggctgaggtacacagagg

SEQ ID NO: 11732 - DNA, 19 bp, Homo sapiens
ggggctgaggtacacagag

SEQ ID NO: 11733 - DNA, 19 bp, Homo sapiens
tggggctgaggtacacaga

SEQ ID NO: 11734 - DNA, 19 bp, Homo sapiens
ctggggctgaggtacacag

SEQ ID NO: 11735 - DNA, 19 bp, Homo sapiens
gctggggctgaggtacaca

SEQ ID NO: 11736 - DNA, 19 bp, Homo sapiens
agctggggctgaggtacac

SEQ ID NO: 11737 - DNA, 19 bp, Homo sapiens
gagctggggctgaggtaca

SEQ ID NO: 11738 - DNA, 19 bp, Homo sapiens
ggagctggggctgaggtac

SEQ ID NO: 11739 - DNA, 19 bp, Homo sapiens
tggagctggggctgaggta

SEQ ID NO: 11740 - DNA, 19 bp, Homo sapiens
ttggagctggggctgaggt

SEQ ID NO: 11741 - DNA, 19 bp, Homo sapiens
cttggagctggggctgagg

SEQ ID NO: 11742 - DNA, 19 bp, Homo sapiens
gcttggagctggggctgag

SEQ ID NO: 11743 - DNA, 19 bp, Homo sapiens
ggcttggagctggggctga

SEQ ID NO: 11744 - DNA, 19 bp, Homo sapiens
gggcttggagctggggctg

SEQ ID NO: 11745 - DNA, 19 bp, Homo sapiens
cgggcttggagctggggct

SEQ ID NO: 11746 - DNA, 19 bp, Homo sapiens
acgggcttggagctggggc

SEQ ID NO: 11747 - DNA, 19 bp, Homo sapiens
cacgggcttggagctgggg

SEQ ID NO: 11748 - DNA, 19 bp, Homo sapiens
ccacgggcttggagctggg

SEQ ID NO: 11749 - DNA, 19 bp, Homo sapiens
gccacgggcttggagctgg

SEQ ID NO: 11750 - DNA, 19 bp, Homo sapiens
ggccacgggcttggagctg

SEQ ID NO: 11751 - DNA, 19 bp, Homo sapiens
gggccacgggcttggagct

SEQ ID NO: 11752 - DNA, 19 bp, Homo sapiens
agggccacgggcttggagc

SEQ ID NO: 11753 - DNA, 19 bp, Homo sapiens
cagggccacgggcttggag

SEQ ID NO: 11754 - DNA, 19 bp, Homo sapiens
ccagggccacgggcttgga

SEQ ID NO: 11755 - DNA, 19 bp, Homo sapiens
gccagggccacgggcttgg

SEQ ID NO: 11756 - DNA, 19 bp, Homo sapiens
tgccagggccacgggcttg

SEQ ID NO: 11757 - DNA, 19 bp, Homo sapiens
atgccagggccacgggctt

SEQ ID NO: 11758 - DNA, 19 bp, Homo sapiens
catgccagggccacgggct

SEQ ID NO: 11759 - DNA, 19 bp, Homo sapiens
tcatgccagggccacgggc

SEQ ID NO: 11760 - DNA, 19 bp, Homo sapiens
ctcatgccagggccacggg

SEQ ID NO: 11761 - DNA, 19 bp, Homo sapiens
gctcatgccagggccacgg

SEQ ID NO: 11762 - DNA, 19 bp, Homo sapiens
agctcatgccagggccacg

SEQ ID NO: 11763 - DNA, 19 bp, Homo sapiens
cagctcatgccagggccac

SEQ ID NO: 11764 - DNA, 19 bp, Homo sapiens
acagctcatgccagggcca

SEQ ID NO: 11765 - DNA, 19 bp, Homo sapiens
cacagctcatgccagggcc

SEQ ID NO: 11766 - DNA, 19 bp, Homo sapiens
gcacagctcatgccagggc

SEQ ID NO: 11767 - DNA, 19 bp, Homo sapiens
ggcacagctcatgccaggg

SEQ ID NO: 11768 - DNA, 19 bp, Homo sapiens
gggcacagctcatgccagg

SEQ ID NO: 11769 - DNA, 19 bp, Homo sapiens
tgggcacagctcatgccag

SEQ ID NO: 11770 - DNA, 19 bp, Homo sapiens
ctgggcacagctcatgcca

SEQ ID NO: 11771 - DNA, 19 bp, Homo sapiens
gctgggcacagctcatgcc

SEQ ID NO: 11772 - DNA, 19 bp, Homo sapiens
agctgggcacagctcatgc

SEQ ID NO: 11773 - DNA, 19 bp, Homo sapiens
aagctgggcacagctcatg

SEQ ID NO: 11774 - DNA, 19 bp, Homo sapiens
gaagctgggcacagctcat

SEQ ID NO: 11775 - DNA, 19 bp, Homo sapiens
cgaagctgggcacagctca

SEQ ID NO: 11776 - DNA, 19 bp, Homo sapiens
acgaagctgggcacagctc

SEQ ID NO: 11777 - DNA, 19 bp, Homo sapiens
gacgaagctgggcacagct

SEQ ID NO: 11778 - DNA, 19 bp, Homo sapiens
tgacgaagctgggcacagc

SEQ ID NO: 11779 - DNA, 19 bp, Homo sapiens
ctgacgaagctgggcacag

SEQ ID NO: 11780 - DNA, 19 bp, Homo sapiens
gctgacgaagctgggcaca

SEQ ID NO: 11781 - DNA, 19 bp, Homo sapiens
agctgacgaagctgggcac

SEQ ID NO: 11782 - DNA, 19 bp, Homo sapiens
gagctgacgaagctgggca

SEQ ID NO: 11783 - DNA, 19 bp, Homo sapiens
ggagctgacgaagctgggc

SEQ ID NO: 11784 - DNA, 19 bp, Homo sapiens
tggagctgacgaagctggg

SEQ ID NO: 11785 - DNA, 19 bp, Homo sapiens
ctggagctgacgaagctgg

SEQ ID NO: 11786 - DNA, 19 bp, Homo sapiens
gctggagctgacgaagctg

SEQ ID NO: 11787 - DNA, 19 bp, Homo sapiens
cgctggagctgacgaagct

SEQ ID NO: 11788 - DNA, 19 bp, Homo sapiens
acgctggagctgacgaagc

SEQ ID NO: 11789 - DNA, 19 bp, Homo sapiens
aacgctggagctgacgaag

SEQ ID NO: 11790 - DNA, 19 bp, Homo sapiens
aaacgctggagctgacgaa

SEQ ID NO: 11791 - DNA, 19 bp, Homo sapiens
caaacgctggagctgacga

SEQ ID NO: 11792 - DNA, 19 bp, Homo sapiens
gcaaacgctggagctgacg

SEQ ID NO: 11793 - DNA, 19 bp, Homo sapiens
ggcaaacgctggagctgac

SEQ ID NO: 11794 - DNA, 19 bp, Homo sapiens
aggcaaacgctggagctga

SEQ ID NO: 11795 - DNA, 19 bp, Homo sapiens
caggcaaacgctggagctg

SEQ ID NO: 11796 - DNA, 19 bp, Homo sapiens
ccaggcaaacgctggagct

SEQ ID NO: 11797 - DNA, 19 bp, Homo sapiens
accaggcaaacgctggagc

SEQ ID NO: 11798 - DNA, 19 bp, Homo sapiens
gaccaggcaaacgctggag

SEQ ID NO: 11799 - DNA, 19 bp, Homo sapiens
agaccaggcaaacgctgga

SEQ ID NO: 11800 - DNA, 19 bp, Homo sapiens
cagaccaggcaaacgctgg

SEQ ID NO: 11801 - DNA, 19 bp, Homo sapiens
ccagaccaggcaaacgctg

SEQ ID NO: 11802 - DNA, 19 bp, Homo sapiens
tccagaccaggcaaacgct

SEQ ID NO: 11803 - DNA, 19 bp, Homo sapiens
ttccagaccaggcaaacgc

SEQ ID NO: 11804 - DNA, 19 bp, Homo sapiens
cttccagaccaggcaaacg

SEQ ID NO: 11805 - DNA, 19 bp, Homo sapiens
acttccagaccaggcaaac

SEQ ID NO: 11806 - DNA, 19 bp, Homo sapiens
gacttccagaccaggcaaa

SEQ ID NO: 11807 - DNA, 19 bp, Homo sapiens
ggacttccagaccaggcaa

SEQ ID NO: 11808 - DNA, 19 bp, Homo sapiens
aggacttccagaccaggca

SEQ ID NO: 11809 - DNA, 19 bp, Homo sapiens
caggacttccagaccaggc

SEQ ID NO: 11810 - DNA, 19 bp, Homo sapiens
ccaggacttccagaccagg

SEQ ID NO: 11811 - DNA, 19 bp, Homo sapiens
gccaggacttccagaccag

SEQ ID NO: 11812 - DNA, 19 bp, Homo sapiens
ggccaggacttccagacca

SEQ ID NO: 11813 - DNA, 19 bp, Homo sapiens
cggccaggacttccagacc

SEQ ID NO: 11814 - DNA, 19 bp, Homo sapiens
ccggccaggacttccagac

SEQ ID NO: 11815 - DNA, 19 bp, Homo sapiens
gccggccaggacttccaga

SEQ ID NO: 11816 - DNA, 19 bp, Homo sapiens
ggccggccaggacttccag

SEQ ID NO: 11817 - DNA, 19 bp, Homo sapiens
cggccggccaggacttcca

SEQ ID NO: 11818 - DNA, 19 bp, Homo sapiens
gcggccggccaggacttcc

SEQ ID NO: 11819 - DNA, 19 bp, Homo sapiens
ggcggccggccaggacttc

SEQ ID NO: 11820 - DNA, 19 bp, Homo sapiens
gggcggccggccaggactt

SEQ ID NO: 11821 - DNA, 19 bp, Homo sapiens
tgggcggccggccaggact

SEQ ID NO: 11822 - DNA, 19 bp, Homo sapiens
gtgggcggccggccaggac

SEQ ID NO: 11823 - DNA, 19 bp, Homo sapiens
tgtgggcggccggccagga

SEQ ID NO: 11824 - DNA, 19 bp, Homo sapiens
atgtgggcggccggccagg

SEQ ID NO: 11825 - DNA, 19 bp, Homo sapiens
gatgtgggcggccggccag

SEQ ID NO: 11826 - DNA, 19 bp, Homo sapiens
cgatgtgggcggccggcca

SEQ ID NO: 11827 - DNA, 19 bp, Homo sapiens
ccgatgtgggcggccggcc

SEQ ID NO: 11828 - DNA, 19 bp, Homo sapiens
cccgatgtgggcggccggc

SEQ ID NO: 11829 - DNA, 19 bp, Homo sapiens
gcccgatgtgggcggccgg

SEQ ID NO: 11830 - DNA, 19 bp, Homo sapiens
agcccgatgtgggcggccg

SEQ ID NO: 11831 - DNA, 19 bp, Homo sapiens
gagcccgatgtgggcggcc

SEQ ID NO: 11832 - DNA, 19 bp, Homo sapiens
tgagcccgatgtgggcggc

SEQ ID NO: 11833 - DNA, 19 bp, Homo sapiens
gtgagcccgatgtgggcgg

SEQ ID NO: 11834 - DNA, 19 bp, Homo sapiens
ggtgagcccgatgtgggcg

SEQ ID NO: 11835 - DNA, 19 bp, Homo sapiens
aggtgagcccgatgtgggc

SEQ ID NO: 11836 - DNA, 19 bp, Homo sapiens
aaggtgagcccgatgtggg

SEQ ID NO: 11837 - DNA, 19 bp, Homo sapiens
taaggtgagcccgatgtgg

SEQ ID NO: 11838 - DNA, 19 bp, Homo sapiens
ttaaggtgagcccgatgtg

SEQ ID NO: 11839 - DNA, 19 bp, Homo sapiens
tttaaggtgagcccgatgt

SEQ ID NO: 11840 - DNA, 19 bp, Homo sapiens
ctttaaggtgagcccgatg

SEQ ID NO: 11841 - DNA, 19 bp, Homo sapiens
cctttaaggtgagcccgat

SEQ ID NO: 11842 - DNA, 19 bp, Homo sapiens
acctttaaggtgagcccga

SEQ ID NO: 11843 - DNA, 19 bp, Homo sapiens
gacctttaaggtgagcccg

SEQ ID NO: 11844 - DNA, 19 bp, Homo sapiens
tgacctttaaggtgagccc

SEQ ID NO: 11845 - DNA, 19 bp, Homo sapiens
ttgacctttaaggtgagcc

SEQ ID NO: 11846 - DNA, 19 bp, Homo sapiens
cttgacctttaaggtgagc

SEQ ID NO: 11847 - DNA, 19 bp, Homo sapiens
ccttgacctttaaggtgag

SEQ ID NO: 11848 - DNA, 19 bp, Homo sapiens
tccttgacctttaaggtga

SEQ ID NO: 11849 - DNA, 19 bp, Homo sapiens
ttccttgacctttaaggtg

SEQ ID NO: 11850 - DNA, 19 bp, Homo sapiens
cttccttgacctttaaggt

SEQ ID NO: 11851 - DNA, 19 bp, Homo sapiens
ccttccttgacctttaagg

SEQ ID NO: 11852 - DNA, 19 bp, Homo sapiens
tccttccttgacctttaag

SEQ ID NO: 11853 - DNA, 19 bp, Homo sapiens
ttccttccttgacctttaa

SEQ ID NO: 11854 - DNA, 19 bp, Homo sapiens
tttccttccttgaccttta

SEQ ID NO: 11855 - DNA, 19 bp, Homo sapiens
ttttccttccttgaccttt

SEQ ID NO: 11856 - DNA, 19 bp, Homo sapiens
attttccttccttgacctt

SEQ ID NO: 11857 - DNA, 19 bp, Homo sapiens
tattttccttccttgacct

SEQ ID NO: 11858 - DNA, 19 bp, Homo sapiens
gtattttccttccttgacc

SEQ ID NO: 11859 - DNA, 19 bp, Homo sapiens
agtattttccttccttgac

SEQ ID NO: 11860 - DNA, 19 bp, Homo sapiens
tagtattttccttccttga

SEQ ID NO: 11861 - DNA, 19 bp, Homo sapiens
gtagtattttccttccttg

SEQ ID NO: 11862 - DNA, 19 bp, Homo sapiens
ggtagtattttccttcctt

SEQ ID NO: 11863 - DNA, 19 bp, Homo sapiens
aggtagtattttccttcct

SEQ ID NO: 11864 - DNA, 19 bp, Homo sapiens
caggtagtattttccttcc

SEQ ID NO: 11865 - DNA, 19 bp, Homo sapiens
acaggtagtattttccttc

SEQ ID NO: 11866 - DNA, 19 bp, Homo sapiens
gacaggtagtattttcctt

SEQ ID NO: 11867 - DNA, 19 bp, Homo sapiens
ggacaggtagtattttcct

SEQ ID NO: 11868 - DNA, 19 bp, Homo sapiens
gggacaggtagtattttcc

SEQ ID NO: 11869 - DNA, 19 bp, Homo sapiens
ggggacaggtagtattttc

SEQ ID NO: 11870 - DNA, 19 bp, Homo sapiens
aggggacaggtagtatttt

SEQ ID NO: 11871 - DNA, 19 bp, Homo sapiens
taggggacaggtagtattt

SEQ ID NO: 11872 - DNA, 19 bp, Homo sapiens
ataggggacaggtagtatt

SEQ ID NO: 11873 - DNA, 19 bp, Homo sapiens
cataggggacaggtagtat

SEQ ID NO: 11874 - DNA, 19 bp, Homo sapiens
gcataggggacaggtagta

SEQ ID NO: 11875 - DNA, 19 bp, Homo sapiens
ggcataggggacaggtagt

SEQ ID NO: 11876 - DNA, 19 bp, Homo sapiens
tggcataggggacaggtag

SEQ ID NO: 11877 - DNA, 19 bp, Homo sapiens
gtggcataggggacaggta

SEQ ID NO: 11878 - DNA, 19 bp, Homo sapiens
agtggcataggggacaggt

SEQ ID NO: 11879 - DNA, 19 bp, Homo sapiens
tagtggcataggggacagg

SEQ ID NO: 11880 - DNA, 19 bp, Homo sapiens
ttagtggcataggggacag

SEQ ID NO: 11881 - DNA, 19 bp, Homo sapiens
cttagtggcataggggaca

SEQ ID NO: 11882 - DNA, 19 bp, Homo sapiens
gcttagtggcataggggac

SEQ ID NO: 11883 - DNA, 19 bp, Homo sapiens
ggcttagtggcatagggga

SEQ ID NO: 11884 - DNA, 19 bp, Homo sapiens
tggcttagtggcatagggg

SEQ ID NO: 11885 - DNA, 19 bp, Homo sapiens
ttggcttagtggcataggg

SEQ ID NO: 11886 - DNA, 19 bp, Homo sapiens
gttggcttagtggcatagg

SEQ ID NO: 11887 - DNA, 19 bp, Homo sapiens
cgttggcttagtggcatag

SEQ ID NO: 11888 - DNA, 19 bp, Homo sapiens
acgttggcttagtggcata

SEQ ID NO: 11889 - DNA, 19 bp, Homo sapiens
cacgttggcttagtggcat

SEQ ID NO: 11890 - DNA, 19 bp, Homo sapiens
acacgttggcttagtggca

SEQ ID NO: 11891 - DNA, 19 bp, Homo sapiens
cacacgttggcttagtggc

SEQ ID NO: 11892 - DNA, 19 bp, Homo sapiens
acacacgttggcttagtgg

SEQ ID NO: 11893 - DNA, 19 bp, Homo sapiens
cacacacgttggcttagtg

SEQ ID NO: 11894 - DNA, 19 bp, Homo sapiens
acacacacgttggcttagt

SEQ ID NO: 11895 - DNA, 19 bp, Homo sapiens
gacacacacgttggcttag

SEQ ID NO: 11896 - DNA, 19 bp, Homo sapiens
tgacacacacgttggctta

SEQ ID NO: 11897 - DNA, 19 bp, Homo sapiens
ctgacacacacgttggctt

SEQ ID NO: 11898 - DNA, 19 bp, Homo sapiens
gctgacacacacgttggct

SEQ ID NO: 11899 - DNA, 19 bp, Homo sapiens
agctgacacacacgttggc

SEQ ID NO: 11900 - DNA, 19 bp, Homo sapiens
cagctgacacacacgttgg

SEQ ID NO: 11901 - DNA, 19 bp, Homo sapiens
ccagctgacacacacgttg

SEQ ID NO: 11902 - DNA, 19 bp, Homo sapiens
accagctgacacacacgtt

SEQ ID NO: 11903 - DNA, 19 bp, Homo sapiens
taccagctgacacacacgt

SEQ ID NO: 11904 - DNA, 19 bp, Homo sapiens
ctaccagctgacacacacg

SEQ ID NO: 11905 - DNA, 19 bp, Homo sapiens
gctaccagctgacacacac

SEQ ID NO: 11906 - DNA, 19 bp, Homo sapiens
agctaccagctgacacaca

SEQ ID NO: 11907 - DNA, 19 bp, Homo sapiens
cagctaccagctgacacac

SEQ ID NO: 11908 - DNA, 19 bp, Homo sapiens
ccagctaccagctgacaca

SEQ ID NO: 11909 - DNA, 19 bp, Homo sapiens
cccagctaccagctgacac

SEQ ID NO: 11910 - DNA, 19 bp, Homo sapiens
ccccagctaccagctgaca

SEQ ID NO: 11911 - DNA, 19 bp, Homo sapiens
cccccagctaccagctgac

SEQ ID NO: 11912 - DNA, 19 bp, Homo sapiens
gcccccagctaccagctga

SEQ ID NO: 11913 - DNA, 19 bp, Homo sapiens
cgcccccagctaccagctg

SEQ ID NO: 11914 - DNA, 19 bp, Homo sapiens
gcgcccccagctaccagct

SEQ ID NO: 11915 - DNA, 19 bp, Homo sapiens
tgcgcccccagctaccagc

SEQ ID NO: 11916 - DNA, 19 bp, Homo sapiens
ctgcgcccccagctaccag

SEQ ID NO: 11917 - DNA, 19 bp, Homo sapiens
tctgcgcccccagctacca

SEQ ID NO: 11918 - DNA, 19 bp, Homo sapiens
ctctgcgcccccagctacc

SEQ ID NO: 11919 - DNA, 19 bp, Homo sapiens
cctctgcgcccccagctac

SEQ ID NO: 11920 - DNA, 19 bp, Homo sapiens
tcctctgcgcccccagcta

SEQ ID NO: 11921 - DNA, 19 bp, Homo sapiens
gtcctctgcgcccccagct

SEQ ID NO: 11922 - DNA, 19 bp, Homo sapiens
tgtcctctgcgcccccagc

SEQ ID NO: 11923 - DNA, 19 bp, Homo sapiens
atgtcctctgcgcccccag

SEQ ID NO: 11924 - DNA, 19 bp, Homo sapiens
gatgtcctctgcgccccca

SEQ ID NO: 11925 - DNA, 19 bp, Homo sapiens
tgatgtcctctgcgccccc

SEQ ID NO: 11926 - DNA, 19 bp, Homo sapiens
gtgatgtcctctgcgcccc

SEQ ID NO: 11927 - DNA, 19 bp, Homo sapiens
ggtgatgtcctctgcgccc

SEQ ID NO: 11928 - DNA, 19 bp, Homo sapiens
aggtgatgtcctctgcgcc

SEQ ID NO: 11929 - DNA, 19 bp, Homo sapiens
caggtgatgtcctctgcgc

SEQ ID NO: 11930 - DNA, 19 bp, Homo sapiens
ccaggtgatgtcctctgcg

SEQ ID NO: 11931 - DNA, 19 bp, Homo sapiens
cccaggtgatgtcctctgc

SEQ ID NO: 11932 - DNA, 19 bp, Homo sapiens
ccccaggtgatgtcctctg

SEQ ID NO: 11933 - DNA, 19 bp, Homo sapiens
accccaggtgatgtcctct

SEQ ID NO: 11934 - DNA, 19 bp, Homo sapiens
caccccaggtgatgtcctc

SEQ ID NO: 11935 - DNA, 19 bp, Homo sapiens
gcaccccaggtgatgtcct

SEQ ID NO: 11936 - DNA, 19 bp, Homo sapiens
agcaccccaggtgatgtcc

SEQ ID NO: 11937 - DNA, 19 bp, Homo sapiens
cagcaccccaggtgatgtc

SEQ ID NO: 11938 - DNA, 19 bp, Homo sapiens
gcagcaccccaggtgatgt

SEQ ID NO: 11939 - DNA, 19 bp, Homo sapiens
ggcagcaccccaggtgatg

SEQ ID NO: 11940 - DNA, 19 bp, Homo sapiens
aggcagcaccccaggtgat

SEQ ID NO: 11941 - DNA, 19 bp, Homo sapiens
gaggcagcaccccaggtga

SEQ ID NO: 11942 - DNA, 19 bp, Homo sapiens
agaggcagcaccccaggtg

SEQ ID NO: 11943 - DNA, 19 bp, Homo sapiens
gagaggcagcaccccaggt

SEQ ID NO: 11944 - DNA, 19 bp, Homo sapiens
tgagaggcagcaccccagg

SEQ ID NO: 11945 - DNA, 19 bp, Homo sapiens
gtgagaggcagcaccccag

SEQ ID NO: 11946 - DNA, 19 bp, Homo sapiens
tgtgagaggcagcacccca

SEQ ID NO: 11947 - DNA, 19 bp, Homo sapiens
gtgtgagaggcagcacccc

SEQ ID NO: 11948 - DNA, 19 bp, Homo sapiens
tgtgtgagaggcagcaccc

SEQ ID NO: 11949 - DNA, 19 bp, Homo sapiens
atgtgtgagaggcagcacc

SEQ ID NO: 11950 - DNA, 19 bp, Homo sapiens
aatgtgtgagaggcagcac

SEQ ID NO: 11951 - DNA, 19 bp, Homo sapiens
aaatgtgtgagaggcagca

SEQ ID NO: 11952 - DNA, 19 bp, Homo sapiens
gaaatgtgtgagaggcagc

SEQ ID NO: 11953 - DNA, 19 bp, Homo sapiens
agaaatgtgtgagaggcag

SEQ ID NO: 11954 - DNA, 19 bp, Homo sapiens
cagaaatgtgtgagaggca

SEQ ID NO: 11955 - DNA, 19 bp, Homo sapiens
gcagaaatgtgtgagaggc

SEQ ID NO: 11956 - DNA, 19 bp, Homo sapiens
ggcagaaatgtgtgagagg

SEQ ID NO: 11957 - DNA, 19 bp, Homo sapiens
tggcagaaatgtgtgagag

SEQ ID NO: 11958 - DNA, 19 bp, Homo sapiens
gtggcagaaatgtgtgaga

SEQ ID NO: 11959 - DNA, 19 bp, Homo sapiens
cgtggcagaaatgtgtgag

SEQ ID NO: 11960 - DNA, 19 bp, Homo sapiens
acgtggcagaaatgtgtga

SEQ ID NO: 11961 - DNA, 19 bp, Homo sapiens
cacgtggcagaaatgtgtg

SEQ ID NO: 11962 - DNA, 19 bp, Homo sapiens
ccacgtggcagaaatgtgt

SEQ ID NO: 11963 - DNA, 19 bp, Homo sapiens
accacgtggcagaaatgtg

SEQ ID NO: 11964 - DNA, 19 bp, Homo sapiens
caccacgtggcagaaatgt

SEQ ID NO: 11965 - DNA, 19 bp, Homo sapiens
ccaccacgtggcagaaatg

SEQ ID NO: 11966 - DNA, 19 bp, Homo sapiens
gccaccacgtggcagaaat

SEQ ID NO: 11967 - DNA, 19 bp, Homo sapiens
ggccaccacgtggcagaaa

SEQ ID NO: 11968 - DNA, 19 bp, Homo sapiens
gggccaccacgtggcagaa

SEQ ID NO: 11969 - DNA, 19 bp, Homo sapiens
tgggccaccacgtggcaga

SEQ ID NO: 11970 - DNA, 19 bp, Homo sapiens
ctgggccaccacgtggcag

SEQ ID NO: 11971 - DNA, 19 bp, Homo sapiens
gctgggccaccacgtggca

SEQ ID NO: 11972 - DNA, 19 bp, Homo sapiens
agctgggccaccacgtggc

SEQ ID NO: 11973 - DNA, 19 bp, Homo sapiens
gagctgggccaccacgtgg

SEQ ID NO: 11974 - DNA, 19 bp, Homo sapiens
ggagctgggccaccacgtg

SEQ ID NO: 11975 - DNA, 19 bp, Homo sapiens
aggagctgggccaccacgt

SEQ ID NO: 11976 - DNA, 19 bp, Homo sapiens
gaggagctgggccaccacg

SEQ ID NO: 11977 - DNA, 19 bp, Homo sapiens
tgaggagctgggccaccac

SEQ ID NO: 11978 - DNA, 19 bp, Homo sapiens
gtgaggagctgggccacca

SEQ ID NO: 11979 - DNA, 19 bp, Homo sapiens
ggtgaggagctgggccacc

SEQ ID NO: 11980 - DNA, 19 bp, Homo sapiens
gggtgaggagctgggccac

SEQ ID NO: 11981 - DNA, 19 bp, Homo sapiens
tgggtgaggagctgggcca

SEQ ID NO: 11982 - DNA, 19 bp, Homo sapiens
ctgggtgaggagctgggcc

SEQ ID NO: 11983 - DNA, 19 bp, Homo sapiens
cctgggtgaggagctgggc

SEQ ID NO: 11984 - DNA, 19 bp, Homo sapiens
ccctgggtgaggagctggg

SEQ ID NO: 11985 - DNA, 19 bp, Homo sapiens
gccctgggtgaggagctgg

SEQ ID NO: 11986 - DNA, 19 bp, Homo sapiens
ggccctgggtgaggagctg

SEQ ID NO: 11987 - DNA, 19 bp, Homo sapiens
gggccctgggtgaggagct

SEQ ID NO: 11988 - DNA, 19 bp, Homo sapiens
ggggccctgggtgaggagc

SEQ ID NO: 11989 - DNA, 19 bp, Homo sapiens
gggggccctgggtgaggag

SEQ ID NO: 11990 - DNA, 19 bp, Homo sapiens
tgggggccctgggtgagga

SEQ ID NO: 11991 - DNA, 19 bp, Homo sapiens
ttgggggccctgggtgagg

SEQ ID NO: 11992 - DNA, 19 bp, Homo sapiens
tttgggggccctgggtgag

SEQ ID NO: 11993 - DNA, 19 bp, Homo sapiens
ctttgggggccctgggtga

SEQ ID NO: 11994 - DNA, 19 bp, Homo sapiens
tctttgggggccctgggtg

SEQ ID NO: 11995 - DNA, 19 bp, Homo sapiens
ctctttgggggccctgggt

SEQ ID NO: 11996 - DNA, 19 bp, Homo sapiens
gctctttgggggccctggg

SEQ ID NO: 11997 - DNA, 19 bp, Homo sapiens
tgctctttgggggccctgg

SEQ ID NO: 11998 - DNA, 19 bp, Homo sapiens
ttgctctttgggggccctg

SEQ ID NO: 11999 - DNA, 19 bp, Homo sapiens
cttgctctttgggggccct

SEQ ID NO: 12000 - DNA, 19 bp, Homo sapiens
gcttgctctttgggggccc

SEQ ID NO: 12001 - DNA, 19 bp, Homo sapiens
cgcttgctctttgggggcc

SEQ ID NO: 12002 - DNA, 19 bp, Homo sapiens
acgcttgctctttgggggc

SEQ ID NO: 12003 - DNA, 19 bp, Homo sapiens
gacgcttgctctttggggg

SEQ ID NO: 12004 - DNA, 19 bp, Homo sapiens
agacgcttgctctttgggg

SEQ ID NO: 12005 - DNA, 19 bp, Homo sapiens
cagacgcttgctctttggg

SEQ ID NO: 12006 - DNA, 19 bp, Homo sapiens
ccagacgcttgctctttgg

SEQ ID NO: 12007 - DNA, 19 bp, Homo sapiens
cccagacgcttgctctttg

SEQ ID NO: 12008 - DNA, 19 bp, Homo sapiens
gcccagacgcttgctcttt

SEQ ID NO: 12009 - DNA, 19 bp, Homo sapiens
tgcccagacgcttgctctt

SEQ ID NO: 12010 - DNA, 19 bp, Homo sapiens
ttgcccagacgcttgctct

SEQ ID NO: 12011 - DNA, 19 bp, Homo sapiens
cttgcccagacgcttgctc

SEQ ID NO: 12012 - DNA, 19 bp, Homo sapiens
tcttgcccagacgcttgct

SEQ ID NO: 12013 - DNA, 19 bp, Homo sapiens
ctcttgcccagacgcttgc

SEQ ID NO: 12014 - DNA, 19 bp, Homo sapiens
cctcttgcccagacgcttg

SEQ ID NO: 12015 - DNA, 19 bp, Homo sapiens
tcctcttgcccagacgctt

SEQ ID NO: 12016 - DNA, 19 bp, Homo sapiens
ttcctcttgcccagacgct

SEQ ID NO: 12017 - DNA, 19 bp, Homo sapiens
tttcctcttgcccagacgc

SEQ ID NO: 12018 - DNA, 19 bp, Homo sapiens
ttttcctcttgcccagacg

SEQ ID NO: 12019 - DNA, 19 bp, Homo sapiens
attttcctcttgcccagac

SEQ ID NO: 12020 - DNA, 19 bp, Homo sapiens
cattttcctcttgcccaga

SEQ ID NO: 12021 - DNA, 19 bp, Homo sapiens
gcattttcctcttgcccag

SEQ ID NO: 12022 - DNA, 19 bp, Homo sapiens
ggcattttcctcttgccca

SEQ ID NO: 12023 - DNA, 19 bp, Homo sapiens
gggcattttcctcttgccc

SEQ ID NO: 12024 - DNA, 19 bp, Homo sapiens
agggcattttcctcttgcc

SEQ ID NO: 12025 - DNA, 19 bp, Homo sapiens
cagggcattttcctcttgc

SEQ ID NO: 12026 - DNA, 19 bp, Homo sapiens
acagggcattttcctcttg

SEQ ID NO: 12027 - DNA, 19 bp, Homo sapiens
gacagggcattttcctctt

SEQ ID NO: 12028 - DNA, 19 bp, Homo sapiens
ggacagggcattttcctct

SEQ ID NO: 12029 - DNA, 19 bp, Homo sapiens
gggacagggcattttcctc

SEQ ID NO: 12030 - DNA, 19 bp, Homo sapiens
agggacagggcattttcct

SEQ ID NO: 12031 - DNA, 19 bp, Homo sapiens
tagggacagggcattttcc

SEQ ID NO: 12032 - DNA, 19 bp, Homo sapiens
ctagggacagggcattttc

SEQ ID NO: 12033 - DNA, 19 bp, Homo sapiens
gctagggacagggcatttt

SEQ ID NO: 12034 - DNA, 19 bp, Homo sapiens
agctagggacagggcattt

SEQ ID NO: 12035 - DNA, 19 bp, Homo sapiens
gagctagggacagggcatt

SEQ ID NO: 12036 - DNA, 19 bp, Homo sapiens
tgagctagggacagggcat

SEQ ID NO: 12037 - DNA, 19 bp, Homo sapiens
gtgagctagggacagggca

SEQ ID NO: 12038 - DNA, 19 bp, Homo sapiens
tgtgagctagggacagggc

SEQ ID NO: 12039 - DNA, 19 bp, Homo sapiens
gtgtgagctagggacaggg

SEQ ID NO: 12040 - DNA, 19 bp, Homo sapiens
agtgtgagctagggacagg

SEQ ID NO: 12041 - DNA, 19 bp, Homo sapiens
gagtgtgagctagggacag

SEQ ID NO: 12042 - DNA, 19 bp, Homo sapiens
tgagtgtgagctagggaca

SEQ ID NO: 12043 - DNA, 19 bp, Homo sapiens
atgagtgtgagctagggac

SEQ ID NO: 12044 - DNA, 19 bp, Homo sapiens
gatgagtgtgagctaggga

SEQ ID NO: 12045 - DNA, 19 bp, Homo sapiens
ggatgagtgtgagctaggg

SEQ ID NO: 12046 - DNA, 19 bp, Homo sapiens
tggatgagtgtgagctagg

SEQ ID NO: 12047 - DNA, 19 bp, Homo sapiens
gtggatgagtgtgagctag

SEQ ID NO: 12048 - DNA, 19 bp, Homo sapiens
tgtggatgagtgtgagcta

SEQ ID NO: 12049 - DNA, 19 bp, Homo sapiens
gtgtggatgagtgtgagct

SEQ ID NO: 12050 - DNA, 19 bp, Homo sapiens
agtgtggatgagtgtgagc

SEQ ID NO: 12051 - DNA, 19 bp, Homo sapiens
aagtgtggatgagtgtgag

SEQ ID NO: 12052 - DNA, 19 bp, Homo sapiens
taagtgtggatgagtgtga

SEQ ID NO: 12053 - DNA, 19 bp, Homo sapiens
ttaagtgtggatgagtgtg

SEQ ID NO: 12054 - DNA, 19 bp, Homo sapiens
cttaagtgtggatgagtgt

SEQ ID NO: 12055 - DNA, 19 bp, Homo sapiens
gcttaagtgtggatgagtg

SEQ ID NO: 12056 - DNA, 19 bp, Homo sapiens
ggcttaagtgtggatgagt

SEQ ID NO: 12057 - DNA, 19 bp, Homo sapiens
gggcttaagtgtggatgag

SEQ ID NO: 12058 - DNA, 19 bp, Homo sapiens
agggcttaagtgtggatga

SEQ ID NO: 12059 - DNA, 19 bp, Homo sapiens
gagggcttaagtgtggatg

SEQ ID NO: 12060 - DNA, 19 bp, Homo sapiens
cgagggcttaagtgtggat

SEQ ID NO: 12061 - DNA, 19 bp, Homo sapiens
acgagggcttaagtgtgga

SEQ ID NO: 12062 - DNA, 19 bp, Homo sapiens
cacgagggcttaagtgtgg

SEQ ID NO: 12063 - DNA, 19 bp, Homo sapiens
gcacgagggcttaagtgtg

SEQ ID NO: 12064 - DNA, 19 bp, Homo sapiens
tgcacgagggcttaagtgt

SEQ ID NO: 12065 - DNA, 19 bp, Homo sapiens
gtgcacgagggcttaagtg

SEQ ID NO: 12066 - DNA, 19 bp, Homo sapiens
tgtgcacgagggcttaagt

SEQ ID NO: 12067 - DNA, 19 bp, Homo sapiens
gtgtgcacgagggcttaag

SEQ ID NO: 12068 - DNA, 19 bp, Homo sapiens
tgtgtgcacgagggcttaa

SEQ ID NO: 12069 - DNA, 19 bp, Homo sapiens
gtgtgtgcacgagggctta

SEQ ID NO: 12070 - DNA, 19 bp, Homo sapiens
tgtgtgtgcacgagggctt

SEQ ID NO: 12071 - DNA, 19 bp, Homo sapiens
gtgtgtgtgcacgagggct

SEQ ID NO: 12072 - DNA, 19 bp, Homo sapiens
tgtgtgtgtgcacgagggc

SEQ ID NO: 12073 - DNA, 19 bp, Homo sapiens
ttgtgtgtgtgcacgaggg

SEQ ID NO: 12074 - DNA, 19 bp, Homo sapiens
tttgtgtgtgtgcacgagg

SEQ ID NO: 12075 - DNA, 19 bp, Homo sapiens
atttgtgtgtgtgcacgag

SEQ ID NO: 12076 - DNA, 19 bp, Homo sapiens
aatttgtgtgtgtgcacga

SEQ ID NO: 12077 - DNA, 19 bp, Homo sapiens
taatttgtgtgtgtgcacg

SEQ ID NO: 12078 - DNA, 19 bp, Homo sapiens
ataatttgtgtgtgtgcac

SEQ ID NO: 12079 - DNA, 19 bp, Homo sapiens
aataatttgtgtgtgtgca

SEQ ID NO: 12080 - DNA, 19 bp, Homo sapiens
gaataatttgtgtgtgtgc

SEQ ID NO: 12081 - DNA, 19 bp, Homo sapiens
tgaataatttgtgtgtgtg

SEQ ID NO: 12082 - DNA, 19 bp, Homo sapiens
ctgaataatttgtgtgtgt

SEQ ID NO: 12083 - DNA, 19 bp, Homo sapiens
tctgaataatttgtgtgtg

SEQ ID NO: 12084 - DNA, 19 bp, Homo sapiens
atctgaataatttgtgtgt

SEQ ID NO: 12085 - DNA, 19 bp, Homo sapiens
catctgaataatttgtgtg

SEQ ID NO: 12086 - DNA, 19 bp, Homo sapiens
acatctgaataatttgtgt

SEQ ID NO: 12087 - DNA, 19 bp, Homo sapiens
tacatctgaataatttgtg

SEQ ID NO: 12088 - DNA, 19 bp, Homo sapiens
gtacatctgaataatttgt

SEQ ID NO: 12089 - DNA, 19 bp, Homo sapiens
tgtacatctgaataatttg

SEQ ID NO: 12090 - DNA, 19 bp, Homo sapiens
gtgtacatctgaataattt

SEQ ID NO: 12091 - DNA, 19 bp, Homo sapiens
ggtgtacatctgaataatt

SEQ ID NO: 12092 - DNA, 19 bp, Homo sapiens
gggtgtacatctgaataat

SEQ ID NO: 12093 - DNA, 19 bp, Homo sapiens
tgggtgtacatctgaataa

SEQ ID NO: 12094 - DNA, 19 bp, Homo sapiens
gtgggtgtacatctgaata

SEQ ID NO: 12095 - DNA, 19 bp, Homo sapiens
ggtgggtgtacatctgaat

SEQ ID NO: 12096 - DNA, 19 bp, Homo sapiens
gggtgggtgtacatctgaa

SEQ ID NO: 12097 - DNA, 19 bp, Homo sapiens
tgggtgggtgtacatctga

SEQ ID NO: 12098 - DNA, 19 bp, Homo sapiens
gtgggtgggtgtacatctg

SEQ ID NO: 12099 - DNA, 19 bp, Homo sapiens
tgtgggtgggtgtacatct

SEQ ID NO: 12100 - DNA, 19 bp, Homo sapiens
atgtgggtgggtgtacatc

SEQ ID NO: 12101 - DNA, 19 bp, Homo sapiens
tatgtgggtgggtgtacat

SEQ ID NO: 12102 - DNA, 19 bp, Homo sapiens
atatgtgggtgggtgtaca

SEQ ID NO: 12103 - DNA, 19 bp, Homo sapiens
gatatgtgggtgggtgtac

SEQ ID NO: 12104 - DNA, 19 bp, Homo sapiens
agatatgtgggtgggtgta

SEQ ID NO: 12105 - DNA, 19 bp, Homo sapiens
aagatatgtgggtgggtgt

SEQ ID NO: 12106 - DNA, 19 bp, Homo sapiens
taagatatgtgggtgggtg

SEQ ID NO: 12107 - DNA, 19 bp, Homo sapiens
gtaagatatgtgggtgggt

SEQ ID NO: 12108 - DNA, 19 bp, Homo sapiens
tgtaagatatgtgggtggg

SEQ ID NO: 12109 - DNA, 19 bp, Homo sapiens
ctgtaagatatgtgggtgg

SEQ ID NO: 12110 - DNA, 19 bp, Homo sapiens
gctgtaagatatgtgggtg

SEQ ID NO: 12111 - DNA, 19 bp, Homo sapiens
ggctgtaagatatgtgggt

SEQ ID NO: 12112 - DNA, 19 bp, Homo sapiens
tggctgtaagatatgtggg

SEQ ID NO: 12113 - DNA, 19 bp, Homo sapiens
ctggctgtaagatatgtgg

SEQ ID NO: 12114 - DNA, 19 bp, Homo sapiens
tctggctgtaagatatgtg

SEQ ID NO: 12115 - DNA, 19 bp, Homo sapiens
ctctggctgtaagatatgt

SEQ ID NO: 12116 - DNA, 19 bp, Homo sapiens
cctctggctgtaagatatg

SEQ ID NO: 12117 - DNA, 19 bp, Homo sapiens
tcctctggctgtaagatat

SEQ ID NO: 12118 - DNA, 19 bp, Homo sapiens
ttcctctggctgtaagata

SEQ ID NO: 12119 - DNA, 19 bp, Homo sapiens
gttcctctggctgtaagat

SEQ ID NO: 12120 - DNA, 19 bp, Homo sapiens
ggttcctctggctgtaaga

SEQ ID NO: 12121 - DNA, 19 bp, Homo sapiens
tggttcctctggctgtaag

SEQ ID NO: 12122 - DNA, 19 bp, Homo sapiens
ctggttcctctggctgtaa

SEQ ID NO: 12123 - DNA, 19 bp, Homo sapiens
gctggttcctctggctgta

SEQ ID NO: 12124 - DNA, 19 bp, Homo sapiens
tgctggttcctctggctgt

SEQ ID NO: 12125 - DNA, 19 bp, Homo sapiens
gtgctggttcctctggctg

SEQ ID NO: 12126 - DNA, 19 bp, Homo sapiens
agtgctggttcctctggct

SEQ ID NO: 12127 - DNA, 19 bp, Homo sapiens
gagtgctggttcctctggc

SEQ ID NO: 12128 - DNA, 19 bp, Homo sapiens
ggagtgctggttcctctgg

SEQ ID NO: 12129 - DNA, 19 bp, Homo sapiens
tggagtgctggttcctctg

SEQ ID NO: 12130 - DNA, 19 bp, Homo sapiens
atggagtgctggttcctct

SEQ ID NO: 12131 - DNA, 19 bp, Homo sapiens
gatggagtgctggttcctc

SEQ ID NO: 12132 - DNA, 19 bp, Homo sapiens
tgatggagtgctggttcct

SEQ ID NO: 12133 - DNA, 19 bp, Homo sapiens
gtgatggagtgctggttcc

SEQ ID NO: 12134 - DNA, 19 bp, Homo sapiens
agtgatggagtgctggttc

SEQ ID NO: 12135 - DNA, 19 bp, Homo sapiens
cagtgatggagtgctggtt

SEQ ID NO: 12136 - DNA, 19 bp, Homo sapiens
tcagtgatggagtgctggt

SEQ ID NO: 12137 - DNA, 19 bp, Homo sapiens
ctcagtgatggagtgctgg

SEQ ID NO: 12138 - DNA, 19 bp, Homo sapiens
tctcagtgatggagtgctg

SEQ ID NO: 12139 - DNA, 19 bp, Homo sapiens
ctctcagtgatggagtgct

SEQ ID NO: 12140 - DNA, 19 bp, Homo sapiens
gctctcagtgatggagtgc

SEQ ID NO: 12141 - DNA, 19 bp, Homo sapiens
ggctctcagtgatggagtg

SEQ ID NO: 12142 - DNA, 19 bp, Homo sapiens
gggctctcagtgatggagt

SEQ ID NO: 12143 - DNA, 19 bp, Homo sapiens
cgggctctcagtgatggag

SEQ ID NO: 12144 - DNA, 19 bp, Homo sapiens
tcgggctctcagtgatgga

SEQ ID NO: 12145 - DNA, 19 bp, Homo sapiens
gtcgggctctcagtgatgg

SEQ ID NO: 12146 - DNA, 19 bp, Homo sapiens
agtcgggctctcagtgatg

SEQ ID NO: 12147 - DNA, 19 bp, Homo sapiens
aagtcgggctctcagtgat

SEQ ID NO: 12148 - DNA, 19 bp, Homo sapiens
gaagtcgggctctcagtga

SEQ ID NO: 12149 - DNA, 19 bp, Homo sapiens
cgaagtcgggctctcagtg

SEQ ID NO: 12150 - DNA, 19 bp, Homo sapiens
acgaagtcgggctctcagt

SEQ ID NO: 12151 - DNA, 19 bp, Homo sapiens
aacgaagtcgggctctcag

SEQ ID NO: 12152 - DNA, 19 bp, Homo sapiens
aaacgaagtcgggctctca

SEQ ID NO: 12153 - DNA, 19 bp, Homo sapiens
gaaacgaagtcgggctctc

SEQ ID NO: 12154 - DNA, 19 bp, Homo sapiens
agaaacgaagtcgggctct

SEQ ID NO: 12155 - DNA, 19 bp, Homo sapiens
cagaaacgaagtcgggctc

SEQ ID NO: 12156 - DNA, 19 bp, Homo sapiens
ccagaaacgaagtcgggct

SEQ ID NO: 12157 - DNA, 19 bp, Homo sapiens
cccagaaacgaagtcgggc

SEQ ID NO: 12158 - DNA, 19 bp, Homo sapiens
ccccagaaacgaagtcggg

SEQ ID NO: 12159 - DNA, 19 bp, Homo sapiens
gccccagaaacgaagtcgg

SEQ ID NO: 12160 - DNA, 19 bp, Homo sapiens
tgccccagaaacgaagtcg

SEQ ID NO: 12161 - DNA, 19 bp, Homo sapiens
ttgccccagaaacgaagtc

SEQ ID NO: 12162 - DNA, 19 bp, Homo sapiens
gttgccccagaaacgaagt

SEQ ID NO: 12163 - DNA, 19 bp, Homo sapiens
agttgccccagaaacgaag

SEQ ID NO: 12164 - DNA, 19 bp, Homo sapiens
cagttgccccagaaacgaa

SEQ ID NO: 12165 - DNA, 19 bp, Homo sapiens
tcagttgccccagaaacga

SEQ ID NO: 12166 - DNA, 19 bp, Homo sapiens
ctcagttgccccagaaacg

SEQ ID NO: 12167 - DNA, 19 bp, Homo sapiens
tctcagttgccccagaaac

SEQ ID NO: 12168 - DNA, 19 bp, Homo sapiens
ctctcagttgccccagaaa

SEQ ID NO: 12169 - DNA, 19 bp, Homo sapiens
gctctcagttgccccagaa

SEQ ID NO: 12170 - DNA, 19 bp, Homo sapiens
agctctcagttgccccaga

SEQ ID NO: 12171 - DNA, 19 bp, Homo sapiens
cagctctcagttgccccag

SEQ ID NO: 12172 - DNA, 19 bp, Homo sapiens
tcagctctcagttgcccca

SEQ ID NO: 12173 - DNA, 19 bp, Homo sapiens
ctcagctctcagttgcccc

SEQ ID NO: 12174 - DNA, 19 bp, Homo sapiens
gctcagctctcagttgccc

SEQ ID NO: 12175 - DNA, 19 bp, Homo sapiens
cgctcagctctcagttgcc

SEQ ID NO: 12176 - DNA, 19 bp, Homo sapiens
gcgctcagctctcagttgc

SEQ ID NO: 12177 - DNA, 19 bp, Homo sapiens
agcgctcagctctcagttg

SEQ ID NO: 12178 - DNA, 19 bp, Homo sapiens
aagcgctcagctctcagtt

SEQ ID NO: 12179 - DNA, 19 bp, Homo sapiens
aaagcgctcagctctcagt

SEQ ID NO: 12180 - DNA, 19 bp, Homo sapiens
caaagcgctcagctctcag

SEQ ID NO: 12181 - DNA, 19 bp, Homo sapiens
gcaaagcgctcagctctca

SEQ ID NO: 12182 - DNA, 19 bp, Homo sapiens
agcaaagcgctcagctctc

SEQ ID NO: 12183 - DNA, 19 bp, Homo sapiens
aagcaaagcgctcagctct

SEQ ID NO: 12184 - DNA, 19 bp, Homo sapiens
taagcaaagcgctcagctc

SEQ ID NO: 12185 - DNA, 19 bp, Homo sapiens
gtaagcaaagcgctcagct

SEQ ID NO: 12186 - DNA, 19 bp, Homo sapiens
ggtaagcaaagcgctcagc

SEQ ID NO: 12187 - DNA, 19 bp, Homo sapiens
tggtaagcaaagcgctcag

SEQ ID NO: 12188 - DNA, 19 bp, Homo sapiens
ttggtaagcaaagcgctca

SEQ ID NO: 12189 - DNA, 19 bp, Homo sapiens
tttggtaagcaaagcgctc

SEQ ID NO: 12190 - DNA, 19 bp, Homo sapiens
ttttggtaagcaaagcgct

SEQ ID NO: 12191 - DNA, 19 bp, Homo sapiens
cttttggtaagcaaagcgc

SEQ ID NO: 12192 - DNA, 19 bp, Homo sapiens
gcttttggtaagcaaagcg

SEQ ID NO: 12193 - DNA, 19 bp, Homo sapiens
agcttttggtaagcaaagc

SEQ ID NO: 12194 - DNA, 19 bp, Homo sapiens
gagcttttggtaagcaaag

SEQ ID NO: 12195 - DNA, 19 bp, Homo sapiens
tgagcttttggtaagcaaa

SEQ ID NO: 12196 - DNA, 19 bp, Homo sapiens
ctgagcttttggtaagcaa

SEQ ID NO: 12197 - DNA, 19 bp, Homo sapiens
cctgagcttttggtaagca

SEQ ID NO: 12198 - DNA, 19 bp, Homo sapiens
ccctgagcttttggtaagc

SEQ ID NO: 12199 - DNA, 19 bp, Homo sapiens
gccctgagcttttggtaag

SEQ ID NO: 12200 - DNA, 19 bp, Homo sapiens
ggccctgagcttttggtaa

SEQ ID NO: 12201 - DNA, 19 bp, Homo sapiens
gggccctgagcttttggta

SEQ ID NO: 12202 - DNA, 19 bp, Homo sapiens
agggccctgagcttttggt

SEQ ID NO: 12203 - DNA, 19 bp, Homo sapiens
cagggccctgagcttttgg

SEQ ID NO: 12204 - DNA, 19 bp, Homo sapiens
acagggccctgagcttttg

SEQ ID NO: 12205 - DNA, 19 bp, Homo sapiens
cacagggccctgagctttt

SEQ ID NO: 12206 - DNA, 19 bp, Homo sapiens
gcacagggccctgagcttt

SEQ ID NO: 12207 - DNA, 19 bp, Homo sapiens
ggcacagggccctgagctt

SEQ ID NO: 12208 - DNA, 19 bp, Homo sapiens
tggcacagggccctgagct

SEQ ID NO: 12209 - DNA, 19 bp, Homo sapiens
ctggcacagggccctgagc

SEQ ID NO: 12210 - DNA, 19 bp, Homo sapiens
cctggcacagggccctgag

SEQ ID NO: 12211 - DNA, 19 bp, Homo sapiens
gcctggcacagggccctga

SEQ ID NO: 12212 - DNA, 19 bp, Homo sapiens
ggcctggcacagggccctg

SEQ ID NO: 12213 - DNA, 19 bp, Homo sapiens
tggcctggcacagggccct

SEQ ID NO: 12214 - DNA, 19 bp, Homo sapiens
ttggcctggcacagggccc

SEQ ID NO: 12215 - DNA, 19 bp, Homo sapiens
tttggcctggcacagggcc

SEQ ID NO: 12216 - DNA, 19 bp, Homo sapiens
ctttggcctggcacagggc

SEQ ID NO: 12217 - DNA, 19 bp, Homo sapiens
tctttggcctggcacaggg

SEQ ID NO: 12218 - DNA, 19 bp, Homo sapiens
atctttggcctggcacagg

SEQ ID NO: 12219 - DNA, 19 bp, Homo sapiens
gatctttggcctggcacag

SEQ ID NO: 12220 - DNA, 19 bp, Homo sapiens
ggatctttggcctggcaca

SEQ ID NO: 12221 - DNA, 19 bp, Homo sapiens
gggatctttggcctggcac

SEQ ID NO: 12222 - DNA, 19 bp, Homo sapiens
ggggatctttggcctggca

SEQ ID NO: 12223 - DNA, 19 bp, Homo sapiens
gggggatctttggcctggc

SEQ ID NO: 12224 - DNA, 19 bp, Homo sapiens
ggggggatctttggcctgg

SEQ ID NO: 12225 - DNA, 19 bp, Homo sapiens
tggggggatctttggcctg

SEQ ID NO: 12226 - DNA, 19 bp, Homo sapiens
ctggggggatctttggcct

SEQ ID NO: 12227 - DNA, 19 bp, Homo sapiens
tctggggggatctttggcc

SEQ ID NO: 12228 - DNA, 19 bp, Homo sapiens
gtctggggggatctttggc

SEQ ID NO: 12229 - DNA, 19 bp, Homo sapiens
ggtctggggggatctttgg

SEQ ID NO: 12230 - DNA, 19 bp, Homo sapiens
gggtctggggggatctttg

SEQ ID NO: 12231 - DNA, 19 bp, Homo sapiens
ggggtctggggggatcttt

SEQ ID NO: 12232 - DNA, 19 bp, Homo sapiens
gggggtctggggggatctt

SEQ ID NO: 12233 - DNA, 19 bp, Homo sapiens
tgggggtctggggggatct

SEQ ID NO: 12234 - DNA, 19 bp, Homo sapiens
atgggggtctggggggatc

SEQ ID NO: 12235 - DNA, 19 bp, Homo sapiens
aatgggggtctggggggat

SEQ ID NO: 12236 - DNA, 19 bp, Homo sapiens
gaatgggggtctgggggga

SEQ ID NO: 12237 - DNA, 19 bp, Homo sapiens
agaatgggggtctgggggg

SEQ ID NO: 12238 - DNA, 19 bp, Homo sapiens
cagaatgggggtctggggg

SEQ ID NO: 12239 - DNA, 19 bp, Homo sapiens
tcagaatgggggtctgggg

SEQ ID NO: 12240 - DNA, 19 bp, Homo sapiens
gtcagaatgggggtctggg

SEQ ID NO: 12241 - DNA, 19 bp, Homo sapiens
tgtcagaatgggggtctgg

SEQ ID NO: 12242 - DNA, 19 bp, Homo sapiens
atgtcagaatgggggtctg

SEQ ID NO: 12243 - DNA, 19 bp, Homo sapiens
gatgtcagaatgggggtct

SEQ ID NO: 12244 - DNA, 19 bp, Homo sapiens
ggatgtcagaatgggggtc

SEQ ID NO: 12245 - DNA, 19 bp, Homo sapiens
tggatgtcagaatgggggt

SEQ ID NO: 12246 - DNA, 19 bp, Homo sapiens
gtggatgtcagaatggggg

SEQ ID NO: 12247 - DNA, 19 bp, Homo sapiens
tgtggatgtcagaatgggg

SEQ ID NO: 12248 - DNA, 19 bp, Homo sapiens
atgtggatgtcagaatggg

SEQ ID NO: 12249 - DNA, 19 bp, Homo sapiens
catgtggatgtcagaatgg

SEQ ID NO: 12250 - DNA, 19 bp, Homo sapiens
gcatgtggatgtcagaatg

SEQ ID NO: 12251 - DNA, 19 bp, Homo sapiens
agcatgtggatgtcagaat

SEQ ID NO: 12252 - DNA, 19 bp, Homo sapiens
gagcatgtggatgtcagaa

SEQ ID NO: 12253 - DNA, 19 bp, Homo sapiens
agagcatgtggatgtcaga

SEQ ID NO: 12254 - DNA, 19 bp, Homo sapiens
cagagcatgtggatgtcag

SEQ ID NO: 12255 - DNA, 19 bp, Homo sapiens
gcagagcatgtggatgtca

SEQ ID NO: 12256 - DNA, 19 bp, Homo sapiens
tgcagagcatgtggatgtc

SEQ ID NO: 12257 - DNA, 19 bp, Homo sapiens
ctgcagagcatgtggatgt

SEQ ID NO: 12258 - DNA, 19 bp, Homo sapiens
actgcagagcatgtggatg

SEQ ID NO: 12259 - DNA, 19 bp, Homo sapiens
gactgcagagcatgtggat

SEQ ID NO: 12260 - DNA, 19 bp, Homo sapiens
ggactgcagagcatgtgga

SEQ ID NO: 12261 - DNA, 19 bp, Homo sapiens
aggactgcagagcatgtgg

SEQ ID NO: 12262 - DNA, 19 bp, Homo sapiens
caggactgcagagcatgtg

SEQ ID NO: 12263 - DNA, 19 bp, Homo sapiens
ccaggactgcagagcatgt

SEQ ID NO: 12264 - DNA, 19 bp, Homo sapiens
gccaggactgcagagcatg

SEQ ID NO: 12265 - DNA, 19 bp, Homo sapiens
ggccaggactgcagagcat

SEQ ID NO: 12266 - DNA, 19 bp, Homo sapiens
gggccaggactgcagagca

SEQ ID NO: 12267 - DNA, 19 bp, Homo sapiens
ggggccaggactgcagagc

SEQ ID NO: 12268 - DNA, 19 bp, Homo sapiens
gggggccaggactgcagag

SEQ ID NO: 12269 - DNA, 19 bp, Homo sapiens
agggggccaggactgcaga

SEQ ID NO: 12270 - DNA, 19 bp, Homo sapiens
gagggggccaggactgcag

SEQ ID NO: 12271 - DNA, 19 bp, Homo sapiens
cgagggggccaggactgca

SEQ ID NO: 12272 - DNA, 19 bp, Homo sapiens
acgagggggccaggactgc

SEQ ID NO: 12273 - DNA, 19 bp, Homo sapiens
gacgagggggccaggactg

SEQ ID NO: 12274 - DNA, 19 bp, Homo sapiens
tgacgagggggccaggact

SEQ ID NO: 12275 - DNA, 19 bp, Homo sapiens
atgacgagggggccaggac

SEQ ID NO: 12276 - DNA, 19 bp, Homo sapiens
aatgacgagggggccagga

SEQ ID NO: 12277 - DNA, 19 bp, Homo sapiens
aaatgacgagggggccagg

SEQ ID NO: 12278 - DNA, 19 bp, Homo sapiens
aaaatgacgagggggccag

SEQ ID NO: 12279 - DNA, 19 bp, Homo sapiens
gaaaatgacgagggggcca

SEQ ID NO: 12280 - DNA, 19 bp, Homo sapiens
agaaaatgacgagggggcc

SEQ ID NO: 12281 - DNA, 19 bp, Homo sapiens
aagaaaatgacgagggggc

SEQ ID NO: 12282 - DNA, 19 bp, Homo sapiens
aaagaaaatgacgaggggg

SEQ ID NO: 12283 - DNA, 19 bp, Homo sapiens
gaaagaaaatgacgagggg

SEQ ID NO: 12284 - DNA, 19 bp, Homo sapiens
ggaaagaaaatgacgaggg

SEQ ID NO: 12285 - DNA, 19 bp, Homo sapiens
gggaaagaaaatgacgagg

SEQ ID NO: 12286 - DNA, 19 bp, Homo sapiens
tgggaaagaaaatgacgag

SEQ ID NO: 12287 - DNA, 19 bp, Homo sapiens
ctgggaaagaaaatgacga

SEQ ID NO: 12288 - DNA, 19 bp, Homo sapiens
tctgggaaagaaaatgacg

SEQ ID NO: 12289 - DNA, 19 bp, Homo sapiens
ttctgggaaagaaaatgac

SEQ ID NO: 12290 - DNA, 19 bp, Homo sapiens
cttctgggaaagaaaatga

SEQ ID NO: 12291 - DNA, 19 bp, Homo sapiens
gcttctgggaaagaaaatg

SEQ ID NO: 12292 - DNA, 19 bp, Homo sapiens
cgcttctgggaaagaaaat

SEQ ID NO: 12293 - DNA, 19 bp, Homo sapiens
gcgcttctgggaaagaaaa

SEQ ID NO: 12294 - DNA, 19 bp, Homo sapiens
ggcgcttctgggaaagaaa

SEQ ID NO: 12295 - DNA, 19 bp, Homo sapiens
gggcgcttctgggaaagaa

SEQ ID NO: 12296 - DNA, 19 bp, Homo sapiens
agggcgcttctgggaaaga

SEQ ID NO: 12297 - DNA, 19 bp, Homo sapiens
cagggcgcttctgggaaag

SEQ ID NO: 12298 - DNA, 19 bp, Homo sapiens
acagggcgcttctgggaaa

SEQ ID NO: 12299 - DNA, 19 bp, Homo sapiens
tacagggcgcttctgggaa

SEQ ID NO: 12300 - DNA, 19 bp, Homo sapiens
atacagggcgcttctggga

SEQ ID NO: 12301 - DNA, 19 bp, Homo sapiens
aatacagggcgcttctggg

SEQ ID NO: 12302 - DNA, 19 bp, Homo sapiens
aaatacagggcgcttctgg

SEQ ID NO: 12303 - DNA, 19 bp, Homo sapiens
taaatacagggcgcttctg

SEQ ID NO: 12304 - DNA, 19 bp, Homo sapiens
ataaatacagggcgcttct

SEQ ID NO: 12305 - DNA, 19 bp, Homo sapiens
aataaatacagggcgcttc

SEQ ID NO: 12306 - DNA, 19 bp, Homo sapiens
gaataaatacagggcgctt

SEQ ID NO: 12307 - DNA, 19 bp, Homo sapiens
ggaataaatacagggcgct

SEQ ID NO: 12308 - DNA, 19 bp, Homo sapiens
gggaataaatacagggcgc

SEQ ID NO: 12309 - DNA, 19 bp, Homo sapiens
ggggaataaatacagggcg

SEQ ID NO: 12310 - DNA, 19 bp, Homo sapiens
gggggaataaatacagggc

SEQ ID NO: 12311 - DNA, 19 bp, Homo sapiens
tgggggaataaatacaggg

SEQ ID NO: 12312 - DNA, 19 bp, Homo sapiens
atgggggaataaatacagg

SEQ ID NO: 12313 - DNA, 19 bp, Homo sapiens
gatgggggaataaatacag

SEQ ID NO: 12314 - DNA, 19 bp, Homo sapiens
agatgggggaataaataca

SEQ ID NO: 12315 - DNA, 19 bp, Homo sapiens
aagatgggggaataaatac

SEQ ID NO: 12316 - DNA, 19 bp, Homo sapiens
gaagatgggggaataaata

SEQ ID NO: 12317 - DNA, 19 bp, Homo sapiens
tgaagatgggggaataaat

SEQ ID NO: 12318 - DNA, 19 bp, Homo sapiens
atgaagatgggggaataaa

SEQ ID NO: 12319 - DNA, 19 bp, Homo sapiens
gatgaagatgggggaataa

SEQ ID NO: 12320 - DNA, 19 bp, Homo sapiens
ggatgaagatgggggaata

SEQ ID NO: 12321 - DNA, 19 bp, Homo sapiens
gggatgaagatgggggaat

SEQ ID NO: 12322 - DNA, 19 bp, Homo sapiens
tgggatgaagatgggggaa

SEQ ID NO: 12323 - DNA, 19 bp, Homo sapiens
ttgggatgaagatggggga

SEQ ID NO: 12324 - DNA, 19 bp, Homo sapiens
gttgggatgaagatggggg

SEQ ID NO: 12325 - DNA, 19 bp, Homo sapiens
tgttgggatgaagatgggg

SEQ ID NO: 12326 - DNA, 19 bp, Homo sapiens
ctgttgggatgaagatggg

SEQ ID NO: 12327 - DNA, 19 bp, Homo sapiens
gctgttgggatgaagatgg

SEQ ID NO: 12328 - DNA, 19 bp, Homo sapiens
ggctgttgggatgaagatg

SEQ ID NO: 12329 - DNA, 19 bp, Homo sapiens
gggctgttgggatgaagat

SEQ ID NO: 12330 - DNA, 19 bp, Homo sapiens
tgggctgttgggatgaaga

SEQ ID NO: 12331 - DNA, 19 bp, Homo sapiens
ctgggctgttgggatgaag

SEQ ID NO: 12332 - DNA, 19 bp, Homo sapiens
gctgggctgttgggatgaa

SEQ ID NO: 12333 - DNA, 19 bp, Homo sapiens
tgctgggctgttgggatga

SEQ ID NO: 12334 - DNA, 19 bp, Homo sapiens
ttgctgggctgttgggatg

SEQ ID NO: 12335 - DNA, 19 bp, Homo sapiens
cttgctgggctgttgggat

SEQ ID NO: 12336 - DNA, 19 bp, Homo sapiens
tcttgctgggctgttggga

SEQ ID NO: 12337 - DNA, 19 bp, Homo sapiens
ttcttgctgggctgttggg

SEQ ID NO: 12338 - DNA, 19 bp, Homo sapiens
cttcttgctgggctgttgg

SEQ ID NO: 12339 - DNA, 19 bp, Homo sapiens
ccttcttgctgggctgttg

SEQ ID NO: 12340 - DNA, 19 bp, Homo sapiens
tccttcttgctgggctgtt

SEQ ID NO: 12341 - DNA, 19 bp, Homo sapiens
ctccttcttgctgggctgt

SEQ ID NO: 12342 - DNA, 19 bp, Homo sapiens
cctccttcttgctgggctg

SEQ ID NO: 12343 - DNA, 19 bp, Homo sapiens
tcctccttcttgctgggct

SEQ ID NO: 12344 - DNA, 19 bp, Homo sapiens
ctcctccttcttgctgggc

SEQ ID NO: 12345 - DNA, 19 bp, Homo sapiens
tctcctccttcttgctggg

SEQ ID NO: 12346 - DNA, 19 bp, Homo sapiens
gtctcctccttcttgctgg

SEQ ID NO: 12347 - DNA, 19 bp, Homo sapiens
tgtctcctccttcttgctg

SEQ ID NO: 12348 - DNA, 19 bp, Homo sapiens
ctgtctcctccttcttgct

SEQ ID NO: 12349 - DNA, 19 bp, Homo sapiens
tctgtctcctccttcttgc

SEQ ID NO: 12350 - DNA, 19 bp, Homo sapiens
ctctgtctcctccttcttg

SEQ ID NO: 12351 - DNA, 19 bp, Homo sapiens
tctctgtctcctccttctt

SEQ ID NO: 12352 - DNA, 19 bp, Homo sapiens
ctctctgtctcctccttct

SEQ ID NO: 12353 - DNA, 19 bp, Homo sapiens
gctctctgtctcctccttc

SEQ ID NO: 12354 - DNA, 19 bp, Homo sapiens
agctctctgtctcctcctt

SEQ ID NO: 12355 - DNA, 19 bp, Homo sapiens
gagctctctgtctcctcct

SEQ ID NO: 12356 - DNA, 19 bp, Homo sapiens
ggagctctctgtctcctcc

SEQ ID NO: 12357 - DNA, 19 bp, Homo sapiens
aggagctctctgtctcctc

SEQ ID NO: 12358 - DNA, 19 bp, Homo sapiens
gaggagctctctgtctcct

SEQ ID NO: 12359 - DNA, 19 bp, Homo sapiens
ggaggagctctctgtctcc

SEQ ID NO: 12360 - DNA, 19 bp, Homo sapiens
gggaggagctctctgtctc

SEQ ID NO: 12361 - DNA, 19 bp, Homo sapiens
agggaggagctctctgtct

SEQ ID NO: 12362 - DNA, 19 bp, Homo sapiens
cagggaggagctctctgtc

SEQ ID NO: 12363 - DNA, 19 bp, Homo sapiens
ccagggaggagctctctgt

SEQ ID NO: 12364 - DNA, 19 bp, Homo sapiens
cccagggaggagctctctg

SEQ ID NO: 12365 - DNA, 19 bp, Homo sapiens
acccagggaggagctctct

SEQ ID NO: 12366 - DNA, 19 bp, Homo sapiens
aacccagggaggagctctc

SEQ ID NO: 12367 - DNA, 19 bp, Homo sapiens
caacccagggaggagctct

SEQ ID NO: 12368 - DNA, 19 bp, Homo sapiens
acaacccagggaggagctc

SEQ ID NO: 12369 - DNA, 19 bp, Homo sapiens
gacaacccagggaggagct

SEQ ID NO: 12370 - DNA, 19 bp, Homo sapiens
agacaacccagggaggagc

SEQ ID NO: 12371 - DNA, 19 bp, Homo sapiens
cagacaacccagggaggag

SEQ ID NO: 12372 - DNA, 19 bp, Homo sapiens
acagacaacccagggagga

SEQ ID NO: 12373 - DNA, 19 bp, Homo sapiens
cacagacaacccagggagg

SEQ ID NO: 12374 - DNA, 19 bp, Homo sapiens
ccacagacaacccagggag

SEQ ID NO: 12375 - DNA, 19 bp, Homo sapiens
tccacagacaacccaggga

SEQ ID NO: 12376 - DNA, 19 bp, Homo sapiens
gtccacagacaacccaggg

SEQ ID NO: 12377 - DNA, 19 bp, Homo sapiens
ggtccacagacaacccagg

SEQ ID NO: 12378 - DNA, 19 bp, Homo sapiens
gggtccacagacaacccag

SEQ ID NO: 12379 - DNA, 19 bp, Homo sapiens
ggggtccacagacaaccca

SEQ ID NO: 12380 - DNA, 19 bp, Homo sapiens
gggggtccacagacaaccc

SEQ ID NO: 12381 - DNA, 19 bp, Homo sapiens
ggggggtccacagacaacc

SEQ ID NO: 12382 - DNA, 19 bp, Homo sapiens
gggggggtccacagacaac

SEQ ID NO: 12383 - DNA, 19 bp, Homo sapiens
tgggggggtccacagacaa

SEQ ID NO: 12384 - DNA, 19 bp, Homo sapiens
ctgggggggtccacagaca

SEQ ID NO: 12385 - DNA, 19 bp, Homo sapiens
cctgggggggtccacagac

SEQ ID NO: 12386 - DNA, 19 bp, Homo sapiens
tcctgggggggtccacaga

SEQ ID NO: 12387 - DNA, 19 bp, Homo sapiens
ctcctgggggggtccacag

SEQ ID NO: 12388 - DNA, 19 bp, Homo sapiens
gctcctgggggggtccaca

SEQ ID NO: 12389 - DNA, 19 bp, Homo sapiens
agctcctgggggggtccac

SEQ ID NO: 12390 - DNA, 19 bp, Homo sapiens
cagctcctgggggggtcca

SEQ ID NO: 12391 - DNA, 19 bp, Homo sapiens
gcagctcctgggggggtcc

SEQ ID NO: 12392 - DNA, 19 bp, Homo sapiens
agcagctcctgggggggtc

SEQ ID NO: 12393 - DNA, 19 bp, Homo sapiens
tagcagctcctgggggggt

SEQ ID NO: 12394 - DNA, 19 bp, Homo sapiens
ttagcagctcctggggggg

SEQ ID NO: 12395 - DNA, 19 bp, Homo sapiens
attagcagctcctgggggg

SEQ ID NO: 12396 - DNA, 19 bp, Homo sapiens
aattagcagctcctggggg

SEQ ID NO: 12397 - DNA, 19 bp, Homo sapiens
caattagcagctcctgggg

SEQ ID NO: 12398 - DNA, 19 bp, Homo sapiens
ccaattagcagctcctggg

SEQ ID NO: 12399 - DNA, 19 bp, Homo sapiens
gccaattagcagctcctgg

SEQ ID NO: 12400 - DNA, 19 bp, Homo sapiens
tgccaattagcagctcctg

SEQ ID NO: 12401 - DNA, 19 bp, Homo sapiens
ctgccaattagcagctcct

SEQ ID NO: 12402 - DNA, 19 bp, Homo sapiens
gctgccaattagcagctcc

SEQ ID NO: 12403 - DNA, 19 bp, Homo sapiens
tgctgccaattagcagctc

SEQ ID NO: 12404 - DNA, 19 bp, Homo sapiens
gtgctgccaattagcagct

SEQ ID NO: 12405 - DNA, 19 bp, Homo sapiens
ggtgctgccaattagcagc

SEQ ID NO: 12406 - DNA, 19 bp, Homo sapiens
gggtgctgccaattagcag

SEQ ID NO: 12407 - DNA, 19 bp, Homo sapiens
tgggtgctgccaattagca

SEQ ID NO: 12408 - DNA, 19 bp, Homo sapiens
gtgggtgctgccaattagc

SEQ ID NO: 12409 - DNA, 19 bp, Homo sapiens
agtgggtgctgccaattag

SEQ ID NO: 12410 - DNA, 19 bp, Homo sapiens
gagtgggtgctgccaatta

SEQ ID NO: 12411 - DNA, 19 bp, Homo sapiens
tgagtgggtgctgccaatt

SEQ ID NO: 12412 - DNA, 19 bp, Homo sapiens
ctgagtgggtgctgccaat

SEQ ID NO: 12413 - DNA, 19 bp, Homo sapiens
gctgagtgggtgctgccaa

SEQ ID NO: 12414 - DNA, 19 bp, Homo sapiens
ggctgagtgggtgctgcca

SEQ ID NO: 12415 - DNA, 19 bp, Homo sapiens
tggctgagtgggtgctgcc

SEQ ID NO: 12416 - DNA, 19 bp, Homo sapiens
atggctgagtgggtgctgc

SEQ ID NO: 12417 - DNA, 19 bp, Homo sapiens
aatggctgagtgggtgctg

SEQ ID NO: 12418 - DNA, 19 bp, Homo sapiens
gaatggctgagtgggtgct

SEQ ID NO: 12419 - DNA, 19 bp, Homo sapiens
agaatggctgagtgggtgc

SEQ ID NO: 12420 - DNA, 19 bp, Homo sapiens
gagaatggctgagtgggtg

SEQ ID NO: 12421 - DNA, 19 bp, Homo sapiens
agagaatggctgagtgggt

SEQ ID NO: 12422 - DNA, 19 bp, Homo sapiens
tagagaatggctgagtggg

SEQ ID NO: 12423 - DNA, 19 bp, Homo sapiens
gtagagaatggctgagtgg

SEQ ID NO: 12424 - DNA, 19 bp, Homo sapiens
ggtagagaatggctgagtg

SEQ ID NO: 12425 - DNA, 19 bp, Homo sapiens
gggtagagaatggctgagt

SEQ ID NO: 12426 - DNA, 19 bp, Homo sapiens
tgggtagagaatggctgag

SEQ ID NO: 12427 - DNA, 19 bp, Homo sapiens
atgggtagagaatggctga

SEQ ID NO: 12428 - DNA, 19 bp, Homo sapiens
gatgggtagagaatggctg

SEQ ID NO: 12429 - DNA, 19 bp, Homo sapiens
ggatgggtagagaatggct

SEQ ID NO: 12430 - DNA, 19 bp, Homo sapiens
aggatgggtagagaatggc

SEQ ID NO: 12431 - DNA, 19 bp, Homo sapiens
aaggatgggtagagaatgg

SEQ ID NO: 12432 - DNA, 19 bp, Homo sapiens
taaggatgggtagagaatg

SEQ ID NO: 12433 - DNA, 19 bp, Homo sapiens
ctaaggatgggtagagaat

SEQ ID NO: 12434 - DNA, 19 bp, Homo sapiens
actaaggatgggtagagaa

SEQ ID NO: 12435 - DNA, 19 bp, Homo sapiens
tactaaggatgggtagaga

SEQ ID NO: 12436 - DNA, 19 bp, Homo sapiens
gtactaaggatgggtagag

SEQ ID NO: 12437 - DNA, 19 bp, Homo sapiens
tgtactaaggatgggtaga

SEQ ID NO: 12438 - DNA, 19 bp, Homo sapiens
atgtactaaggatgggtag

SEQ ID NO: 12439 - DNA, 19 bp, Homo sapiens
catgtactaaggatgggta

SEQ ID NO: 12440 - DNA, 19 bp, Homo sapiens
gcatgtactaaggatgggt

SEQ ID NO: 12441 - DNA, 19 bp, Homo sapiens
agcatgtactaaggatggg

SEQ ID NO: 12442 - DNA, 19 bp, Homo sapiens
gagcatgtactaaggatgg

SEQ ID NO: 12443 - DNA, 19 bp, Homo sapiens
agagcatgtactaaggatg

SEQ ID NO: 12444 - DNA, 19 bp, Homo sapiens
cagagcatgtactaaggat

SEQ ID NO: 12445 - DNA, 19 bp, Homo sapiens
acagagcatgtactaagga

SEQ ID NO: 12446 - DNA, 19 bp, Homo sapiens
gacagagcatgtactaagg

SEQ ID NO: 12447 - DNA, 19 bp, Homo sapiens
ggacagagcatgtactaag

SEQ ID NO: 12448 - DNA, 19 bp, Homo sapiens
tggacagagcatgtactaa

SEQ ID NO: 12449 - DNA, 19 bp, Homo sapiens
ctggacagagcatgtacta

SEQ ID NO: 12450 - DNA, 19 bp, Homo sapiens
gctggacagagcatgtact

SEQ ID NO: 12451 - DNA, 19 bp, Homo sapiens
agctggacagagcatgtac

SEQ ID NO: 12452 - DNA, 19 bp, Homo sapiens
aagctggacagagcatgta

SEQ ID NO: 12453 - DNA, 19 bp, Homo sapiens
aaagctggacagagcatgt

SEQ ID NO: 12454 - DNA, 19 bp, Homo sapiens
gaaagctggacagagcatg

SEQ ID NO: 12455 - DNA, 19 bp, Homo sapiens
ggaaagctggacagagcat

SEQ ID NO: 12456 - DNA, 19 bp, Homo sapiens
gggaaagctggacagagca

SEQ ID NO: 12457 - DNA, 19 bp, Homo sapiens
ggggaaagctggacagagc

SEQ ID NO: 12458 - DNA, 19 bp, Homo sapiens
tggggaaagctggacagag

SEQ ID NO: 12459 - DNA, 19 bp, Homo sapiens
ctggggaaagctggacaga

SEQ ID NO: 12460 - DNA, 19 bp, Homo sapiens
cctggggaaagctggacag

SEQ ID NO: 12461 - DNA, 19 bp, Homo sapiens
ccctggggaaagctggaca

SEQ ID NO: 12462 - DNA, 19 bp, Homo sapiens
accctggggaaagctggac

SEQ ID NO: 12463 - DNA, 19 bp, Homo sapiens
caccctggggaaagctgga

SEQ ID NO: 12464 - DNA, 19 bp, Homo sapiens
tcaccctggggaaagctgg

SEQ ID NO: 12465 - DNA, 19 bp, Homo sapiens
gtcaccctggggaaagctg

SEQ ID NO: 12466 - DNA, 19 bp, Homo sapiens
tgtcaccctggggaaagct

SEQ ID NO: 12467 - DNA, 19 bp, Homo sapiens
atgtcaccctggggaaagc

SEQ ID NO: 12468 - DNA, 19 bp, Homo sapiens
tatgtcaccctggggaaag

SEQ ID NO: 12469 - DNA, 19 bp, Homo sapiens
gtatgtcaccctggggaaa

SEQ ID NO: 12470 - DNA, 19 bp, Homo sapiens
tgtatgtcaccctggggaa

SEQ ID NO: 12471 - DNA, 19 bp, Homo sapiens
ctgtatgtcaccctgggga

SEQ ID NO: 12472 - DNA, 19 bp, Homo sapiens
tctgtatgtcaccctgggg

SEQ ID NO: 12473 - DNA, 19 bp, Homo sapiens
ttctgtatgtcaccctggg

SEQ ID NO: 12474 - DNA, 19 bp, Homo sapiens
cttctgtatgtcaccctgg

SEQ ID NO: 12475 - DNA, 19 bp, Homo sapiens
ccttctgtatgtcaccctg

SEQ ID NO: 12476 - DNA, 19 bp, Homo sapiens
cccttctgtatgtcaccct

SEQ ID NO: 12477 - DNA, 19 bp, Homo sapiens
ccccttctgtatgtcaccc

SEQ ID NO: 12478 - DNA, 19 bp, Homo sapiens
gccccttctgtatgtcacc

SEQ ID NO: 12479 - DNA, 19 bp, Homo sapiens
tgccccttctgtatgtcac

SEQ ID NO: 12480 - DNA, 19 bp, Homo sapiens
ttgccccttctgtatgtca

SEQ ID NO: 12481 - DNA, 20 bp, Homo sapiens
tagaatcaaggttttagacg

SEQ ID NO: 12482 - DNA, 20 bp, Homo sapiens
cgtctaaaaccttgattcta

SEQ ID NO: 12483 - DNA, 21 bp, Homo sapiens
tagaatcaaggttttagacgt

SEQ ID NO: 12484 - DNA, 21 bp, Homo sapiens
acgtctaaaaccttgattcta

SEQ ID NO: 12485 - DNA, 22 bp, Homo sapiens
tagaatcaaggttttagacgtc

SEQ ID NO: 12486 - DNA, 22 bp, Homo sapiens
gacgtctaaaaccttgattcta

SEQ ID NO: 12487 - DNA, 23 bp, Homo sapiens
tgacgtctaaaaccttgattcta

SEQ ID NO: 12488 - DNA, 23 bp, Homo sapiens
tgagggcatgggtgataactgtg

SEQ ID NO: 12489 - DNA, 24 bp, Homo sapiens
tagaatcaaggttttagacgtcaa

SEQ ID NO: 12490 - DNA, 24 bp, Homo sapiens
ttgacgtctaaaaccttgattcta

SEQ ID NO: 12491 - DNA, 25 bp, Homo sapiens
tagaatcaaggttttagacgtcaac

SEQ ID NO: 12492 - DNA, 25 bp, Homo sapiens
gttgacgtctaaaaccttgattcta

SEQ ID NO: 12493 - DNA, 26 bp, Homo sapiens
tagaatcaaggttttagacgtcaacg

SEQ ID NO: 12494 - DNA, 26 bp, Homo sapiens
cgttgacgtctaaaaccttgattcta

SEQ ID NO: 12495 - DNA, 27 bp, Homo sapiens
tagaatcaaggttttagacgtcaacga

SEQ ID NO: 12496 - DNA, 27 bp, Homo sapiens
tcgttgacgtctaaaaccttgattcta

SEQ ID NO: 12497 - DNA, 28 bp, Homo sapiens
tagaatcaaggttttagacgtcaacgat

SEQ ID NO: 12498 - DNA, 28 bp, Homo sapiens
atcgttgacgtctaaaaccttgattcta

SEQ ID NO: 12499 - DNA, 29 bp, Homo sapiens
tagaatcaaggttttagacgtcaacgata

SEQ ID NO: 12500 - DNA, 29 bp, Homo sapiens
tatcgttgacgtctaaaaccttgattcta

SEQ ID NO: 12501 - DNA, 21 bp, Artificial Sequence
  Synthetic siRNA
ggacaugcucccacuugugtt

SEQ ID NO: 12502 - DNA, 21 bp, Artificial Sequence
  Synthetic siRNA
cacaagugggagcaugucctt

SEQ ID NO: 12503 - DNA, 21 bp, Artificial Sequence
  Synthetic siRNA
ggaggccaugcuuacccautt

SEQ ID NO: 12504 - DNA, 21 bp, Artificial Sequence
  Synthetic siRNA
auggguaagcauggccucctt

SEQ ID NO: 12505 - DNA, 21 bp, Artificial Sequence
  Synthetic siRNA
ggacacacucucacuggugtt

SEQ ID NO: 12506 - DNA, 21 bp, Artificial Sequence
  Synthetic siRNA
caccagugagagugugucctt

SEQ ID NO: 12507 - DNA, 21 bp, Artificial Sequence
  Synthetic siRNA
gggcuuuuaccacaaggautt

SEQ ID NO: 12508 - DNA, 21 bp, Artificial Sequence
  Synthetic siRNA
auccuugugguaaaagccctt

SEQ ID NO: 12509 - DNA, 20 bp, Artificial Sequence
  Synthetic Forward Primer
ttctaccgcggtcaaactct

SEQ ID NO: 12510 - DNA, 20 bp, Artificial Sequence
  Synthetic Reverse Primer
ttggtgtcagggatccaaag

SEQ ID NO: 12511 - DNA, 20 bp, Artificial Sequence
  Synthetic Forward Primer
agccacatcgctcagaacac

SEQ ID NO: 12512 - DNA, 21 bp, Artificial Sequence
  Synthetic Reverse Primer
gaggcattgctgatgatcttg

SEQ ID NO: 12513 - DNA, 21 bp, Artificial Sequence
  Synthetic Forward Primer
acatcaaagaagagaccccag

SEQ ID NO: 12514 - DNA, 21 bp, Artificial Sequence
  Synthetic Reverse Primer
ttcgcactggtgacaatggaa

SEQ ID NO: 12515 - DNA, 21 bp, Homo sapiens
gtgaacggatttggccgtatt

SEQ ID NO: 12516 - DNA, 21 bp, Homo sapiens
ttttggctccacccttcaagt

SEQ ID NO: 12517 - DNA, 20 bp, Artificial Sequence
  Synthetic Forward Primer
ccctggttaagcagtacagc

SEQ ID NO: 12518 - DNA, 21 bp, Artificial Sequence
  Synthetic Reverse Primer
caggactagaacacctgctaa

What is claimed is:

1. A method of human hair removal, comprising
applying to a human in an area comprising hair follicles a double stranded nucleic acid molecule comprising a sequence of at least a portion of human demosglein-4 or nude mRNA and a sequence complementary thereto wherein said double stranded nucleic acid molecule induces RNAi targeted to said human demosglein-4 or nude mRNA, whereby hair growth in said area is inhibited.

2. The method of claim 1, wherein inhibition of hair growth in said area persists at least one month.

3. The method of claim 1, further comprising synchronizing hair growth cycles for hair follicles in said area.

4. The method of claim 3, wherein said synchronizing includes hair extraction.

5. The method of claim 1, where said double stranded nucleic acid comprises at least one 3′-overhang.

6. The method of claim 5, wherein said 3′-overhang is a 2- or 3′-base overhang.

7. The method of claim 5, wherein said 3′-overhang comprises at least one deoxynucleotide.

8. The method of claim 1, wherein at least one strand of said double stranded nucleic acid comprises at least one nucleotide analog or internucleotidic linkage different from unmodified RNA.

9. The method of claim 1, wherein said double stranded nucleic acid molecule is administered in combination with a second double stranded oligonucleotide comprising a sequence of at least a portion of human hairless mRNA, wherein said second double stranded nucleic acid molecule induces RNAi targeted to said human hairless mRNA.

10. The method of claim 1, wherein said double stranded nucleic acid molecule targets a loop sequence indentified in Table 3 or Table 4.

11. The method of claim 1, wherein said double stranded nucleic acid molecule comprises an RNA sense sequence and a complementary RNA antisense sequence selected from the group consisting of dsg4 oligoncleotides 1-3561 or nude oligonucleotides 1-2679.

12. The method of claim 11, wherein said sense sequence and said antisense sequence comprises 19 complementary nucleotides and 1 to 3 non-complementary 3′-nucleotides.

13. The method of claim 11, wherein said sense sequence and said antisense sequence comprises 20 complementary nucleotides and 1 to 3 non-complementary 3′-nucleotides.

14. The method of claim 11, wherein said sense sequence and said antisense sequence comprises 21 complementary nucleotides and 1 to 3 non-complementary 3′-nucleotides.

15. The method of claim 11, wherein said sense sequence and said antisense sequence comprises 22 complementary nucleotides and 1 to 3 non-complementary 3′-nucleotides.

16. The method of claim 11, wherein said sense sequence and said antisense sequence comprises 23 complementary nucleotides and 1 to 3 non-complementary 3′-nucleotides.

17. The method of claim 11, wherein said sense sequence and said antisense sequence comprises 24 complementary nucleotides and 1 to 3 non-complementary 3′-nucleotides.

18. The method of claim 11, wherein said sense sequence and said antisense sequence comprises 25 complementary nucleotides and 1 to 3 non-complementary 3′-nucleotides.

19. The method of claim 11, wherein said sense sequence and said antisense sequence comprises 26 complementary nucleotides and 1 to 3 non-complementary 3′-nucleotides.

20. The method of claim 11, wherein said sense sequence and said antisense sequence comprises 27 complementary nucleotides and 1 to 3 non-complementary 3′-nucleotides.

21. The method of claim 11, wherein said sense sequence and said antisense sequence comprises 28 complementary nucleotides and 1 to 3 non-complementary 3′-nucleotides.

22. A method for hair removal from an area of a mammal comprising hair follicles, comprising
contacting hair follicles in said region with a composition comprising at least one double stranded nucleic acid molecule able to inhibit dsg4 or nude mRNA translation.

23. The method of claim 22, further comprising synchronizing hair growth cycles for hair follicles in said area.

24. The method of claim 23, wherein said synchronizing comprises extraction of hair in said area.

25. The method of claim 22, wherein said mammal is a human.

26. The method of claim 22, wherein said mammal is a mouse.

27. The method of claim 22, wherein said mammal is a rat.

28. The method of claim 22, wherein said mammal is a bovine.

29. The method of claim 22, wherein inhibition of hair growth in said area persists at least one month.

30. The method of claim 22 where said double stranded nucleic acid comprises at least one 3′-overhang.

31. The method of claim 30 wherein said 3′-overhang is a 2- or 3′-base overhang.

32. The method of claim 31 wherein said 3-overhang comprises at least one deoxynucleotide.

33. The method of claim 22, wherein at least one strand of said double stranded nucleic acid comprises at least one nucleotide analog or internucleotidic linkage different from unmodified RNA.

34. The method of claim 22, wherein said double stranded nucleic acid molecule is administered in combination with a second double stranded oligonucleotide comprising a sequence of at least a portion of human hairless mRNA, wherein said second double stranded nucleic acid molecule induces RNAi targeted to said human hairless mRNA.

35. The method of claim 22, wherein said double stranded nucleic acid molecule targets a loop sequence indentified in Table 3 or Table 4.

36. The method of claim 22, wherein said double stranded nucleic acid molecule comprises an RNA sense sequence and a complementary RNA antisense sequence selected from the group consisting of dsg4 oligoncleotides 1-3561 or nude oligonucleotides 1-2679 and their respective antisense sequences, or the species homology of said sequences.

37. The method of claim 36, wherein said sense sequence and said antisense sequence comprises 19 complementary nucleotides and 1 to 3 non-complementary 3′-nucleotides.

38. The method of claim 36, wherein said sense sequence and said antisense sequence comprises 20 complementary nucleotides and 1 to 3 non-complementary 3′-nucleotides.

39. The method of claim 36, wherein said sense sequence and said antisense sequence comprises 21 complementary nucleotides and 1 to 3 non-complementary 3′-nucleotides.

40. The method of claim 36, wherein said sense sequence and said antisense sequence comprises 22 complementary nucleotides and 1 to 3 non-complementary 3′-nucleotides.

41. The method of claim 36, wherein said sense sequence and said antisense sequence comprises 23 complementary nucleotides and 1 to 3 non-complementary 3′-nucleotides.

42. The method of claim 36, wherein said sense sequence and said antisense sequence comprises 24 complementary nucleotides and 1 to 3 non-complementary 3′-nucleotides.

43. The method of claim 36, wherein said sense sequence and said antisense sequence comprises 25 complementary nucleotides and 1 to 3 non-complementary 3′-nucleotides.

44. The method of claim 36, wherein said sense sequence and said antisense sequence comprises 26 complementary nucleotides and 1 to 3 non-complementary 3′-nucleotides.

45. The method of claim 36, wherein said sense sequence and said antisense sequence comprises 27 complementary nucleotides and 1 to 3 non-complementary 3′-nucleotides.

46. The method of claim 36, wherein said sense sequence and said antisense sequence comprises 28 complementary nucleotides and 1 to 3 non-complementary 3′-nucleotides.

47. A method of inhibiting expression of dsg4 or nude protein in a mammal, comprising administering to said mammal a double stranded nucleic acid molecule, wherein said double stranded nucleic acid molecule comprises a sequence selected from the group consisting of dsg4 oligoncleotides 1-3561 and nude oligonucleotides 1-2679 and their respective antisense sequences, or the species homology of said sequences, and a sequence complementary thereto.

48. A method for treating a human desirous of losing hair, comprising
administering to said human a composition comprising a double stranded nucleic acid molecule comprising a sequence of at least a portion of human demosglein-4 or nude mRNA and a sequence complementary thereto wherein said double stranded nucleic acid molecule induces RNAi targeted to said human demosglein-4 or nude mRNA, whereby hair loss is induced in said human.

49. The method of claim 48, wherein said double stranded nucleic acid molecule comprises a sequence selected from the group consisting of dsg4 Oligoncleotides 1-3561 or nude oligonucleotides 1-2679 and their respective antisense sequences, wherein said double stranded nucleic acid molecule induces RNA interference in vitro.

50. A method for marketing a composition for hair removal, comprising
providing for sale to medical practioners or to the public a packaged pharmaceutical composition comprising a double stranded nucleic acid molecule comprising a * sequence of at least a portion of human demosglein-4 or nude mRNA and a sequence complementary thereto wherein said double stranded nucleic acid molecule induces RNAi targeted to said human demosglein-4 or nude mRNA; and
a package label or insert indicating that said pharmaceutical composition can be used for hair removal.

51. The method of claim 50, wherein said pharmaceutical composition is approved by the U.S. Food and Drug Administration for hair removal in humans.

52. The method of claim 51, wherein said pharmaceutical composition is packaged with a hair removal wax or other component adapted for hair removal.

53. An isolated double stranded nucleic acid molecule, comprising
a nucleotide sequence corresponding to at least 14 contiguous nucleotides from human dsg4 or nude mRNA.

54. The double stranded nucleic acid molecule of claim 53, wherein said nucleotide sequence comprises a nucleotide sequence selected from the group consisting of dsg4 oligoncleotides 1-3561 and nude oligonucleotides 1-2679; and
a nucleotide sequence complementary thereto, wherein said double stranded nucleic acid molecule induces RNA interference in a human cell in vitro.

55. The double stranded nucleic acid molecule of claim 53 wherein said nucleic acid molecule includes a sequence of 14-18 contiguous nucleotides from said dsg4 or nude mRNA sequence.

56. The double stranded nucleic acid molecule of claim 53 wherein said nucleic acid molecule includes a sequence of 19-23 contiguous nucleotides from said dsg4 or nude mRNA sequence.

57. The double stranded nucleic acid molecule of claim 53 wherein said nucleic acid molecule includes a sequence of 24-29 contiguous nucleotides from said dsg4 or nude mRNA sequence.

58. A pharmaceutical composition comprising
a double stranded nucleic acid molecule comprising a nucleotide sequence corresponding to at least 14 contiguous nucleotides from human dsg4 or nude mRNA.

59. The pharmaceutical composition of claim 58, wherein said nucleotide sequence comprises a nucleotide sequence selected from the group consisting of dsg4 oligoncleotides 1-3561 and nude oligonucleotides 1-2679, and a sequence complementary thereto, wherein said double stranded nucleic acid molecule induces RNA interference in a human cell in vitro.

60. A kit comprising
a pharmaceutical composition a double stranded nucleic acid molecule comprising
a sequence at least a portion of human demosglein-4 or nude mRNA and a sequence complementary thereto wherein said double stranded nucleic acid molecule induces RNAi targeted to said human demosglein-4 or nude mRNA; and
a package label or insert indicating that said pharmaceutical composition can be used for hair removal.

61. The kit of claim 55, wherein said kit is approved by the U.S. Food and Drug Administration for human hair removal.
